(19) United States
(12) Patent Application Publication
(10) Pub. No.: US 2025/0051766 A1
(43) Pub. Date: Feb. 13, 2025

(54) TREATMENT OF NEUROLOGICAL DISEASES USING MODULATORS OF UNC13A GENE TRANSCRIPTS

(71) Applicants: sandra HINCKLEY, Cambridge, MA (US); Duncan BROWN, Berkeley, CA (US); Daniel ELBAUM, Cambridge, MA (US); QURALIS CORPORATION, Cambridge, MA (US)

(72) Inventors: SANDRA HINCKLEY, Cambridge, MA (US); DUNCAN BROWN, Berkeley, CA (US); DANIEL ELBAUM, Cambridge, MA (US); MARISA ELIZABETH KAMELGARN, Cambridge, MA (US)

(21) Appl. No.: 18/715,644

(22) PCT Filed: Dec. 2, 2022
(86) PCT No.: PCT/US2022/051713

§ 371 Date: Jun. 3, 2024

Related U.S. Application Data
(60) Provisional application No. 63/285,786, filed on Dec. 3, 2021.
(60) Provisional application No. 63/350,206, filed on Jun. 8, 2022.
(60) Provisional application No. 63/398,987, filed on Aug. 18, 2022.

(51) Int. Cl. C12N 15/113; A61K 45/06; A61P 25/28

(52) U.S. Cl. CPC C12N 15/113; A61K 45/06; A61P 25/28; C12N 2310/11; C12N 2310/31; C12N 2310/315; C12N 2310/321; C12N 2310/3231; C12N 2310/3341; C12N 2310/351

(57) ABSTRACT

Disclosed herein are UNC13A oligonucleotides with one or more spacers or without a spacer. In various embodiments, UNC13A oligonucleotides with spacer(s) reduce mis-spliced UNC13A transcripts and increase full length UNC13A transcripts, thereby imparting therapeutic efficacy against neurological diseases such as amyotrophic lateral sclerosis (ALS), frontotemporal dementia (FTD), or Alzheimer's disease (AD).

### CROSS-REFERENCE TO RELATED APPLICATIONS

[0001] This application claims the benefit of U.S. Provisional Application No. 63/285,786, filed on Dec. 3, 2021, U.S. Provisional Application No. 63/350,206, filed on Jun. 8, 2022, and U.S. Provisional Application No. 63/398,987, filed on Aug. 18, 2022, each of which is hereby incorporated herein by reference in its entirety for all purposes.

### FIELD OF THE DISCLOSURE

[0002] This application relates generally to methods of treating neurological diseases with UNC13A splice-switching antisense oligonucleotides, in particular, UNC13A antisense oligonucleotides with one or more spacers that target an UNC13A transcript.

### BACKGROUND

[0003] Motor neuron diseases are a class of neurological diseases that result in the degeneration and death of motor neurons—those neurons which coordinate voluntary movement of muscles by the brain. Motor neuron diseases may be sporadic or inherited, and may affect upper motor neurons and/or lower motor neurons. Motor neuron diseases include amyotrophic lateral sclerosis, progressive bulbar palsy, pseudobulbar palsy, primary lateral sclerosis, progressive muscular atrophy, spinal muscular atrophy, and post-polio syndrome.

[0004] Amyotrophic lateral sclerosis (ALS) is a group of motor neuron diseases affecting about 15,000 individuals in the United States of America. ALS is characterized by degeneration and death of upper and lower motor neurons, resulting in loss of voluntary muscle control. Motor neuron death is accompanied by muscle fasciculation and atrophy. Early symptoms of ALS include muscle cramps, muscle spasticity, muscle weakness (for example, affecting an arm, a leg, neck, or diaphragm), slurred and nasal speech, and difficulty chewing or swallowing. Loss of strength and control over movements, including those necessary for speech, eating, and breathing, eventually occur. Disease progression may be accompanied by weight loss, malnourishment, anxiety, depression, increased risk of pneumonia, muscle cramps, neuropathy, and possibly dementia. Most individuals diagnosed with ALS die of respiratory failure within five years of the first appearance of symptoms. Currently, there is no effective treatment for ALS.

[0005] ALS occurs in individuals of all ages, but is most common in individuals between 55 to 75 years of age, with a slightly higher incidence in males. ALS can be characterized as sporadic or familial. Sporadic ALS appears to occur at random and accounts for more than 90% of all incidences of ALS. Familial ALS accounts for 5-10% of all incidences of ALS.

[0006] FTD refers to a spectrum of progressive neurodegenerative diseases caused by loss of neurons in frontal and temporal lobes of the brain. FTD is the third most common form of dementia (following Alzheimer's disease and dementia with Lewy bodies), and the second most common form of dementia in individuals below 65 years of age. FTD is estimated to affect 50,000 to 60,000 individuals in the United States of America. FTD is characterized by changes in behavior and personality, and language dysfunction. Forms of FTD include behavioral variant FTD (bvFTD), semantic variant primary progressive aphasia (svPPA), and nonfluent variant primary progressive aphasia (nfvPPA). ALS with FTD is characterized by symptoms associated with FTD, along with symptoms of ALS such as muscle weakness, atrophy, fasciculation, spasticity, speech impairment (dysarthria), and inability to swallow (dysphagia). Individuals usually succumb to FTD within 5 to 10 years, while ALS with FTD often results in death within 2 to 3 years of the first disease symptoms appearing.

[0007] Like ALS, there is no known cure for FTD, or ALS with FTD, nor a therapeutic known to prevent or retard either disease's progression.

[0008] Thus, there is a pressing need to identify compounds and/or compositions capable of preventing, ameliorating, and treating neurological diseases such as: amyotrophic lateral sclerosis (ALS), frontotemporal dementia (FTD), ALS with FTD, Alzheimer's disease (AD), Parkinson's disease (PD), Huntington's disease, progressive supranuclear palsy (PSP), brain trauma, spinal cord injury, corticobasal degeneration (CBD), nerve injuries (e.g., brachial plexus injuries), neuropathies (e.g., chemotherapy induced neuropathy), TDP43 proteinopathies (e.g., chronic traumatic encephalopathy, Perry Syndrome, Dementia with Lewy body in association with Alzheimer's disease, Parkinson's disease with or without dementia, and Limbic-predominant age-related TDP-43 encephalopathy (LATE)), epilepsy, Cerebral Age-Related TDP-43 With Sclerosis (CARTS), facial onset sensory and motor neuronopathy, Guam Parkinson-dementia complex, multisystem proteinopathy, CTE, and synaptic diseases like autism.

### SUMMARY

[0009] Described herein are oligonucleotides comprising one or more spacers and comprising a sequence that is at least 85% complementary to an equal length portion of a UNC13A transcript. In one aspect, the present disclosure provides UNC13A oligonucleotides that target a UNC13A transcript (for example, a mis-spliced UNC13A transcript). In various embodiments, the oligonucleotides target a transcript for the treatment of neurological diseases, including motor neuron diseases, and/or neuropathies. For example, UNC13A oligonucleotides can be used to treat PD, ALS, FTD, ALS with FTD, and AD.

[0010] In one aspect the present disclosure provides a compound comprising a modified oligonucleotide comprising a sequence that is at least 85% complementary to an equal length portion of any one of SEQ ID NO: 5057-5065 or SEQ ID NOs: 5206-5208, a sequence having 90% identity thereof, or to a 15 to 50 contiguous nucleobase portion thereof, wherein at least one (i.e., one or more) nucleoside linkage of the oligonucleotide is a non-natural linkage. In various embodiments, the oligonucleotide comprises a spacer.

[0011] In one aspect the present disclosure provides a compound comprising a modified oligonucleotide comprising a sequence that is at least 85% complementary to an equal length portion of any one of SEQ ID NO: 5057-5065 or SEQ ID NOs: 5206-5208, a sequence having 90% identity thereof, or to a 15 to 50 contiguous nucleobase portion thereof, wherein at least one (i.e., one or more) nucleoside linkage of the oligonucleotide is a non-natural linkage, and further wherein the oligonucleotide comprises a spacer. In various embodiments, the oligonucleotide comprises a segment with at most 11 linked nucleosides. In various embodiments, the oligonucleotide comprises a segment with at most 10, 9, or 8 linked nucleosides. In various embodiments, the oligonucleotide comprises a segment with at most 7 linked nucleosides. In certain embodiments, the oligonucleotide comprises a segment with at most 6, 5, 4, 3, or 2 linked nucleosides. In certain embodiments, every segment of the oligonucleotide comprises at most 7 linked nucleosides.

[0012] In various embodiments, the oligonucleotide comprises a sequence that shares at least 85% identity with an equal length portion of any one of SEQ ID NOs: 1-1264, SEQ ID NOs: 2529-3792, SEQ ID NOs; 5066-5166, SEQ ID NOs: 5168-5202, SEQ ID NOs: 5209-5221, or SEQ ID NOs: 5235-5292. In various embodiments, the oligonucleotide comprises a sequence that shares at least 90% identity with an equal length portion of any one of SEQ ID NOs: 1-1264, SEQ ID NOs: 2529-3792, SEQ ID NOs; 5066-5166, SEQ ID NOs: 5168-5202, SEQ ID NOs: 5209-5221, or SEQ ID NOs: 5235-5292. In various embodiments, the oligonucleotide comprises a sequence that shares 95% identity with an equal length portion of any one of SEQ ID NOs: 1-1264, SEQ ID NOs: 2529-3792, SEQ ID NOs; 5066-5166, SEQ ID NOs: 5168-5202, SEQ ID NOs: 5209-5221, or SEQ ID NOs: 5235-5292. In various embodiments, the oligonucleotide comprises a sequence that shares 100% identity with an equal length portion of any one of SEQ ID NOs: 1-1264, SEQ ID NOs: 2529-3792, SEQ ID NOs; 5066-5166, SEQ ID NOs: 5168-5202, SEQ ID NOs: 5209-5221, or SEQ ID NOs: 5235-5292.

[0013] In various embodiments, the oligonucleotide comprises a segment with at most 11 linked nucleosides or at most 7 linked nucleosides, and wherein the oligonucleotide comprises a sequence that shares at least 85% identity with an equal length portion of any one of SEQ ID NO: 5057-5065 or SEQ ID NOs: 5206-5208. In various embodiments, the oligonucleotide comprises a segment with at most 6, 5, 4, 3, or 2 linked nucleosides, and wherein the oligonucleotide comprises a sequence that shares at least 85% identity with an equal length portion of any one of SEQ ID NO: 5057-5065 or SEQ ID NOs: 5206-5208. In various embodiments, the oligonucleotide comprises a segment with at most 6, 5, 4, 3, or 2 linked nucleosides, and wherein the oligonucleotide comprises a sequence that shares at least 90% identity with an equal length portion of any one of SEQ ID NO: 5057-5065 or SEQ ID NOs: 5206-5208.

[0014] In various embodiments, the oligonucleotide is at least 18, at least 19, at least 20, at least 21, at least 22, at least 23, at least 24, or at least 25 oligonucleotide units in length. In various embodiments, the oligonucleotide is at least 19 oligonucleotide units in length. In various embodiments, the spacer is a nucleoside-replacement group comprising a non-sugar substitute that is incapable of linking to a nucleotide base.

[0015] In various embodiments, the spacer is located between positions 10 and 15 of the oligonucleotide. In various embodiments, the spacer is located between positions 7 and 11 of the oligonucleotide. In various embodiments, the oligonucleotide further comprises a second spacer, wherein the second spacer is located between positions 14 and 22 of the oligonucleotide. In various embodiments, the spacer and the second spacer are separated by at least 5 nucleobases, at least 6 nucleobases, or at least 7 nucleobases in the oligonucleotide. In various embodiments, the spacer is located between positions 7 and 9 of the oligonucleotide, and wherein the second spacer is located between positions 15 and 18 of the oligonucleotide. In various embodiments, the spacer is located at position 8 of the oligonucleotide, and wherein the second spacer is located at position 16 of the oligonucleotide. In various embodiments, the oligonucleotide further comprises a third spacer, wherein the third spacer is located between positions 21 and 24 of the oligonucleotide.

[0016] In various embodiments, the spacer is located between positions 2 and 5 of the oligonucleotide. In various embodiments, the oligonucleotide further comprises a second spacer, wherein the second spacer is located between positions 8 and 12 of the oligonucleotide. In various embodiments, the oligonucleotide further comprises a third spacer, wherein the third spacer is located between positions 18 and 22 of the oligonucleotide. In various embodiments, the oligonucleotide further comprises a second spacer and a third spacer, wherein the three spacers are located at positions in the oligonucleotide such that each segment of the oligonucleotide has at most 7 linked nucleosides. In various embodiments, at least two of the three spacers are adjacent to a guanine nucleobase. In various embodiments, each of the at least two of the three spacers immediately precede a guanine nucleobase.

[0017] In various embodiments, each of the first, second or third spacers is a nucleoside-replacement group comprising a non-sugar substitute wherein the non-sugar substitute does not contain a ketone, aldehyde, ketal, hemiketal, acetal, hemiacetal, aminal or hemiaminal moiety and is incapable of forming a covalent bond with a nucleotide base.

[0018] In certain embodiments, each of the first, second or third spacers is independently represented by Formula (X), wherein:

[chemical structure]

[0019] Ring A is an optionally substituted 4-8 member monocyclic cycloalkyl group or a 4-8 member monocyclic heterocyclyl group, wherein the heterocyclyl group contains 1 or 2 heteroatoms selected from O, S and N, provided that A is not capable of forming a covalent bond to a nucleobase; and
[0020] the

[chemical structure]

symbol represents the point of connection to an internucleoside linkage.

[0021] In various embodiments, each of the first, second or third spacers is independently represented by Formula (Xa), wherein:

[chemical structure]

[0022] In some embodiments, ring A is an optionally substituted 4-8 member monocyclic cycloalkyl group selected from cyclobutyl, cyclopentyl, cyclohexyl, cycloheptyl and cyclooctyl; or a 4-8 member monocyclic heterocyclyl group, selected from oxetanyl, tetrahydrofuranyl, tetrahydropyranyl, 1,4-dioxanyl, pyrolidinyl, piperidinyl, piperazinyl, morpholinyl and azepanyl.

[0023] In further embodiments, ring A is tetrahydrofuranyl.

[0024] In other embodiments, ring A is tetrahydropyranyl.

[0025] In various embodiments, each of the first, second or third spacers is independently represented by Formula I, wherein:

[chemical structure]

[0026] X is selected from —CH₂— and —O—; and
[0027] n is 0, 1, 2 or 3.

[0028] In various embodiments, each of the first, second or third spacers is independently represented by Formula I′, wherein:

[chemical structure]

[0029] X is selected from —CH₂— and —O—; and
[0030] n is 0, 1, 2 or 3.

[0031] In various embodiments, each of the first, second or third spacers is independently represented by Formula (Ia), wherein:

[chemical structure]

and
[0032] n is 0, 1, 2 or 3.

[0033] In various embodiments, each of the first, second or third spacers is independently represented by Formula (Ia′), wherein:

[chemical structure]

and
[0034] n is 0, 1, 2 or 3.

[0035] In certain embodiments, each of the first, second or third spacers is independently represented by Formula II, wherein:

[chemical structure]

and
[0036] X is selected from —CH₂— and —O—.

[0037] In further embodiments, each of the first, second or third spacers is independently represented by Formula II′, wherein:

[chemical structure]

and
[0038] X is selected from —CH₂— and —O—.

[0039] In various embodiments, each of the first, second or third spacers is independently represented by Formula (Iia), wherein:

[chemical structure]

[0040] In further embodiments, each of the first, second or third spacers is independently represented by Formula (Iia′), wherein:

[chemical structure]

[0041] In some embodiments, the spacer is represented by Formula (IIi), wherein:

[chemical structure]

[0042] X is selected from —CH₂— and —O—.

[0043] In some embodiments, the spacer is represented by Formula (IIi′), wherein:

[chemical structure]

[0044] X is selected from —CH₂— and —O.

[0045] In some embodiments, the spacer is represented by Formula (IIib), wherein:

[chemical structure]

[0046] In some embodiments, the spacer is represented by Formula (Iiib′), wherein:

[chemical structure]

[0047] In various embodiments, each of the first, second or third spacers is independently represented by Formula III, wherein:

[chemical structure]

and
[0048] X is selected from —CH₂— and —O—.

[0049] In further embodiments, each of the first, second or third spacers is independently represented by Formula III′, wherein:

[chemical structure]

and
[0050] X is selected from —CH₂— and —O—.

[0051] In some embodiments, each of the first, second or third spacers is independently represented by Formula (IIIa), wherein:

[chemical structure]

[0052] In further embodiments, each of the first, second or third spacers is independently represented by Formula (IIIa′), wherein:

[chemical structure]

[0053] In various embodiments, the oligonucleotide comprising the spacer has a GC content of at least 10%. In various embodiments, the oligonucleotide comprising the spacer has a GC content of at least 20%. In various embodiments, the oligonucleotide comprising the spacer has a GC content of at least 25%. In various embodiments, the oligonucleotide comprising the spacer has a GC content of at least 30%. In various embodiments, the oligonucleotide comprising the spacer has a GC content of at least 40%. In various embodiments, the oligonucleotide comprising the spacer has a GC content of at least 50%.

[0054] In various embodiments, the oligonucleotide is between 12 and 40 oligonucleotide units in length.

[0055] In various embodiments, at least one (i.e., one or more) nucleoside linkage of the oligonucleotide is independently selected from the group consisting of a phosphodiester linkage, a phosphorothioate linkage, an alkyl phosphate linkage, a phosphorodithioate linkage, a phosphotriester linkage, an alkylphosphonate linkage, a 3-methoxypropyl phosphonate linkage, a methylphosphonate linkage, an aminoalkylphosphotriester linkage, an alkylene phosphonate linkage, a phosphinate linkage, a phosphoramidate linkage, a phosphoramidothioate linkage, a thiophosphorodiamidate linkage, a phosphorodiamidate (e.g., comprising a phosphorodiamidate morpholino (PMO), 3′ amino ribose, or 5′ amino ribose) linkage, an aminoalkylphosphoramidate linkage, a thiophosphoramidate linkage, a thionoalkylphosphonate linkage, a thionoalkylphosphotriester linkage, a thiophosphate linkage, a selenophosphate linkage, and a boranophosphate linkage.

[0056] In various embodiments, one or more nucleoside linkages that link a base at position 3 or position 4 of the oligonucleotide are phosphodiester linkages. In various embodiments, only one nucleoside linkage that links a base at position 3 or position 4 of the oligonucleotide is a phosphodiester linkage. In various embodiments, nucleoside linkages that link bases at both position 3 and position 4 of the oligonucleotide are phosphodiester linkages. In various embodiments, one or more bases immediately preceding a spacer in the oligonucleotide are linked through phosphodiester bonds. In various embodiments, only the base immediately preceding the spacer in the oligonucleotide is linked to the spacer through a phosphodiester bond. In various embodiments, the base immediately preceding the spacer in the oligonucleotide is further linked to a further preceding base through a phosphodiester bond. In various embodiments, the oligonucleotide comprises a second spacer, wherein a base immediately preceding the second spacer is linked to a further preceding base through a phosphodiester bond.

[0057] In various embodiments, one or more bases immediately succeeding a spacer in the oligonucleotide are linked through phosphodiester bonds. In various embodiments, only the base immediately succeeding the spacer in the oligonucleotide is linked to the spacer through a phosphodiester bond. In various embodiments, two bases immediately preceding the spacer in the oligonucleotide are linked through phosphodiester bonds. In various embodiments, one or more bases immediately preceding a spacer in the oligonucleotide are linked through phosphodiester bonds and wherein one or more bases immediately succeeding the spacer in the oligonucleotide are linked through phosphodiester bonds. In various embodiments, one base immediately preceding the spacer and one base immediately succeeding the spacer are linked through phosphodiester bonds. In various embodiments, the oligonucleotide includes a second spacer, and wherein one or more bases immediately preceding the second spacer in the oligonucleotide are linked through phosphodiester bonds and wherein one or more bases immediately succeeding the second spacer in the oligonucleotide are linked through phosphodiester bonds. In various embodiments, one base immediately preceding the second spacer and one base immediately succeeding the second spacer are linked through phosphodiester bonds. In various embodiments, the oligonucleotide comprises a range of bases that are linked through phosphodiester bonds, the range of bases comprising at least two bases. In various embodiments, the oligonucleotide comprises a range of bases that are linked through phosphodiester bonds, the range of bases comprising at least five bases. In various embodiments, the oligonucleotide comprises two or more spacers, and wherein the range of bases are positioned between the at least two spacers.

[0058] Additionally disclosed herein is a compound comprising an oligonucleotide comprising a nucleobase sequence that shares at least 90% identity to an equal length portion of any one of SEQ ID NOs: 1-1264, SEQ ID NOs: 2529-3792, SEQ ID NOs; 5066-5166, SEQ ID NOs: 5168-5202, SEQ ID NOs: 5209-5221, or SEQ ID NOs: 5235-5292. Additionally disclosed herein is an oligonucleotide comprising a nucleobase sequence that shares at least 90% identity to an equal length portion of any one of SEQ ID NOs: 1-1264, SEQ ID NOs: 2529-3792, SEQ ID NOs; 5066-5166, SEQ ID NOs: 5168-5202, SEQ ID NOs: 5209-5221, or SEQ ID NOs: 5235-5292. In various embodiments, the nucleobase sequence shares at least 95% identity to an equal length portion of any one of SEQ ID NOs: 1-1264, SEQ ID NOs: 2529-3792, SEQ ID NOs; 5066-5166, SEQ ID NOs: 5168-5202, SEQ ID NOs: 5209-5221, or SEQ ID NOs: 5235-5292. In various embodiments, the nucleobase sequence shares at least 100% identity to an equal length portion of any one of SEQ ID NOs: 1-1264, SEQ ID NOs: 2529-3792, SEQ ID NOs; 5066-5166, SEQ ID NOs: 5168-5202, SEQ ID NOs: 5209-5221, or SEQ ID NOs: 5235-5292. In various embodiments, the oligonucleotide is any one of a 19mer, 21mer, 23mer, or 25mer.

[0059] In various embodiments, an internucleoside linkage of the oligonucleotide is a modified internucleoside linkage. In various embodiments, the modified internucleoside linkage of the oligonucleotide is a phosphorothioate linkage. In various embodiments, all internucleoside linkages of the oligonucleotide are phosphorothioate linkages. In various embodiments, the phosphorothioate linkage is in one of a Rp configuration or a Sp configuration. In various embodiments, the oligonucleotide comprises at least one modified sugar moiety. In various embodiments, the modified sugar moiety is one of a 2′-OMe modified sugar moiety, bicyclic sugar moiety, 2′-O-(2-methoxyethyl) (MOE), 2′-deoxy-2′-fluoro nucleoside, 2′-fluoro-β-D-arabinonucleoside, locked nucleic acid (LNA), a tricyclic nucleic acid (tcDNA) (e.g., tricyclic nucleic acid with ethyl (2′O—CH₂—CH₂-4′C) as the bridge or tricyclic nucleic acid with methyl substituted methyl (2′O—CH(CH₂)-4′C) bridge), constrained ethyl 2′-4′-bridged nucleic acid (cEt), S-cEt, tcDNA, hexitol nucleic acids (HNA), tricyclic analog (e.g., tcDNA), and unlocked nucleic acids.

[0060] In various embodiments, the oligonucleotide exhibits at least a 30%, 40%, 5%, 60%, 70%, 80%, or 90% increase of full length UNC13A protein. In various embodiments, the oligonucleotide exhibits at least a 100% increase of full length UNC13A protein. In various embodiments, the oligonucleotide exhibits at least a 200% increase of full length UNC13A protein. In various embodiments, the oligonucleotide exhibits at least a 300% increase of full length UNC13A protein. In various embodiments, the oligonucleotide exhibits at least a 400% increase of full length UNC13A protein. In various embodiments, increase of the full length UNC13A protein is measured in comparison to a reduced level of full length UNC13A protein achieved using a TDP43 antisense oligonucleotide. In various embodiments, the oligonucleotide exhibits at least a 10%, 20%, 30%, 40%, 50%, 60%, 70%, 80%, 90%, or 100% rescue of full length UNC13A protein. In various embodiments, the oligonucleotide exhibits at least a 50%, 60%, 70%, 80%, or 90% reduction of a mis-spliced UNC13A transcript.

[0061] Additionally disclosed is a method of treating a neurological disease and/or a neuropathy in a patient in need thereof, the method comprising administering to the patient an oligonucleotide of any of the oligonucleotides disclosed above. In various embodiments, the neurological disease selected from the group consisting of: amyotrophic lateral sclerosis (ALS), frontotemporal dementia (FTD), ALS with FTD, Alzheimer's disease (AD), Parkinson's disease (PD), Huntington's disease, progressive supranuclear palsy (PSP), brain trauma, spinal cord injury, corticobasal degeneration (CBD), nerve injuries (e.g., brachial plexus injuries), neuropathies (e.g., chemotherapy induced neuropathy), TDP43 proteinopathies (e.g., chronic traumatic encephalopathy, Perry Syndrome, Dementia with Lewy body in association with Alzheimer's disease, Parkinson's disease with or without dementia, and Limbic-predominant age-related TDP-43 encephalopathy (LATE)), epilepsy, Cerebral Age-Related TDP-43 With Sclerosis (CARTS), facial onset sensory and motor neuronopathy, Guam Parkinson-dementia complex, multisystem proteinopathy, CTE, and synaptic diseases like autism. In various embodiments, the neurological disease is ALS. In various embodiments, the neurological disease is FTD. In various embodiments, the neurological disease is ALS with FTD. In various embodiments, the neurological disease is AD. In various embodiments, the neurological disease is PD. In various embodiments, the neuropathy is chemotherapy induced neuropathy.

[0062] Additionally disclosed is a method of restoring axonal outgrowth and/or regeneration of a neuron, the method comprising exposing the motor neuron to an oligonucleotide of any of the oligonucleotides disclosed above. Additionally disclosed is a method of increasing, promoting, stabilizing, or maintaining UNC13A expression and/or function in a neuron, the method comprising exposing the cell to an oligonucleotide of any of the oligonucleotides disclosed above.

[0063] In various embodiments, the neuron is a neuron of a patient in need of treatment of a neurological disease and/or a neuropathy. In various embodiments, the neuropathy is chemotherapy induced neuropathy. In various embodiments, the exposing is performed in vivo or ex vivo. In various embodiments, the exposing comprises administering the oligonucleotide to a patient in need thereof. In various embodiments, the oligonucleotide is administered topically, parenterally, intrathecally, intrathalamically, intracistemally, orally, rectally, buccally, sublingually, vaginally, pulmonarily, intratracheally, intranasally, transdermally, or intraduodenally. In various embodiments, the oligonucleotide is administered orally. In various embodiments, a therapeutically effective amount of the oligonucleotide is administered intrathecally, intrathalamically or intracisternally. In various embodiments, the patient is a human.

[0064] Additionally disclosed herein is a pharmaceutical composition comprising the oligonucleotide of any one of the oligonucleotides disclosed above, or a pharmaceutically acceptable salt thereof, and a pharmaceutically acceptable excipient. In various embodiments, the pharmaceutical composition is suitable for topical, intrathecal, intrathalamic, intracisternal, intracerebroventricular, parenteral, oral, pulmonary, intratracheal, intranasal, transdermal, rectal, buccal, sublingual, vaginal, or intraduodenal administration.

[0065] Additionally disclosed herein is a method of treating a neurological disease or a neuropathy in a patient in need thereof, the method comprising administering to a patient in need thereof a therapeutically effective amount of a pharmaceutical composition disclosed above. In various embodiments, the neurological disease is selected from the group consisting of amyotrophic lateral sclerosis (ALS), frontotemporal dementia (FTD), ALS with FTD, Alzheimer's disease (AD), Parkinson's disease (PD), Parkinson's Disease with dementia, dementia with lewy bodies, synucleinopathies, Huntington's disease, Brachial plexus injuries, peripheral nerve injuries, progressive supranuclear palsy (PSP), brain trauma, spinal cord injury, tuberous sclerosis complex, Pick's Disease, tauopathies, primary age-related tauopathy, Down Syndrome, epilepsy/seizure disorder, depression, traumatic brain injury (TBI), chronic traumatic encephalopathy (CTE), HIV-associated neurocognitive disorders (HAND), multisystem atrophy, amnestic mild cognitive impairment, corticobasal degeneration (CBD) and/or neuropathies such a chemotherapy induced neuropathy, Spinocerebellar ataxia (SCA), SCA type 2, Spinal Muscular Atrophy (SMA), Parkinsonism, Niemann-Pick disease type C (NPC), Charcot-Marie-Tooth Disease (CMT), Mucopolysaccharidosis type II (MPSIIA), Mucolipidosis IV, GM1 gangliosidosis, Sporadic inclusion body myositis (sIBM), Henoch-Schonlein purpura (HSP), Limbic-predominant age-related TDP-43 encephalopathy (LATE)), Cerebral Age-Related TDP-43 With Sclerosis (CARTS), Gaucher's disease, and facial onset sensory and motor neuronopathy, Guam Parkinson-dementia complex, multisystem proteinopathy, Perry disease, and synaptic diseases like autism. In various embodiments, the neurological disease is ALS. In various embodiments, the neurological disease is FTD. In various embodiments, the neurological disease is ALS with FTD. In various embodiments, the neuropathy is chemotherapy induced neuropathy. In various embodiments, the pharmaceutical composition is administered topically, parenterally, orally, pulmonarily, rectally, buccally, sublingually, vaginally, intratracheally, intranasally, intracistemally, intrathecally, intrathalamically, intravenously, intramuscularly, transdermally, or intraduodenally. In various embodiments, wherein the pharmaceutical composition is administered intrathecally, intrathalamically intracerebroventricularly, or intracistemally. In various embodiments, a therapeutically effective amount of the oligonucleotide is administered intrathecally, intrathalamically or intracisternally. In various embodiments, the patient is human.

[0066] Additionally disclosed herein is a method for treating a neurological disease in a subject in need thereof, the method comprising administering to the subject an oligonucleotide comprising a segment with at most 7 linked nucleosides, and wherein oligonucleotide shares at least 85% identity with any one of SEQ ID NOs: 1-1264, SEQ ID NOs: 2529-3792, SEQ ID NOs; 5066-5166, SEQ ID NOs: 5168-5202, SEQ ID NOs: 5209-5221, or SEQ ID NOs: 5235-5292, or a pharmaceutically acceptable salt thereof, wherein at least one (i.e., one or more) nucleoside linkage of the oligonucleotide is independently selected from the group consisting of: a phosphodiester linkage, a phosphorothioate linkage, an alkyl phosphate linkage, a phosphorodithioate linkage, a phosphotriester linkage, an alkylphosphonate linkage, a 3-methoxypropyl phosphonate linkage, a methylphosphonate linkage, an aminoalkylphosphotriester linkage, an alkylene phosphonate linkage, a phosphinate linkage, a phosphoramidate linkage, a phosphoramidothioate linkage, a thiophosphorodiamidate linkage, a phosphorodiamidate (e.g., comprising a phosphorodiamidate morpholino (PMO), 3′ amino ribose, or 5′ amino ribose) linkage, an aminoalkylphosphoramidate linkage, a thiophosphoramidate linkage, a thionoalkylphosphonate linkage, a thionoalkylphosphotriester linkage, a thiophosphate linkage, a selenophosphate linkage, and a boranophosphate linkage, and/or wherein at least one (i.e., one or more) nucleoside is substituted with a component selected from the group consisting of a 2′-O-(2-methoxyethyl) nucleoside, a 2′-O-methyl nucleoside, a 2′-O—(N-methylacetamide) nucleoside, a 2′-deoxy-2′-fluoro nucleoside, a 2′-fluoro-β-D-arabinonucleoside, a locked nucleic acid (LNA), a tricyclic nucleic acid, constrained methoxyethyl (cMOE), constrained ethyl (cET), and a peptide nucleic acid (PNA), optionally wherein the oligonucleotide further comprises a spacer.

[0067] Additionally disclosed herein is a method for treating ALS in a subject in need thereof, the method comprising administering to the subject an oligonucleotide comprising a segment with at most 7 linked nucleosides, and wherein oligonucleotide shares at least 85% identity with any one of SEQ ID NOs: 1-1264, SEQ ID NOs: 2529-3792, SEQ ID NOs; 5066-5166, SEQ ID NOs: 5168-5202, SEQ ID NOs: 5209-5221, or SEQ ID NOs: 5235-5292, or a pharmaceutically acceptable salt thereof; wherein at least one (i.e., one or more) nucleoside linkage of the oligonucleotide is independently selected from the group consisting of: a phosphodiester linkage, a phosphorothioate linkage, an alkyl phosphate linkage, a phosphorodithioate linkage, a phosphotriester linkage, an alkylphosphonate linkage, a 3-methoxypropyl phosphonate linkage, a methylphosphonate linkage, an aminoalkylphosphotriester linkage, an alkylene phosphonate linkage, a phosphinate linkage, a phosphoramidate linkage, a phosphoramidothioate linkage, a thiophosphorodiamidate linkage, a phosphorodiamidate (e.g., comprising a phosphorodiamidate morpholino (PMO), 3′ amino ribose, or 5′ amino ribose) linkage, an aminoalkylphosphoramidate linkage, a thiophosphoramidate linkage, a thionoalkylphosphonate linkage, a thionoalkylphosphotriester linkage, a thiophosphate linkage, a selenophosphate linkage, and a boranophosphate linkage, and/or wherein at least one (i.e., one or more) nucleoside is substituted with a component selected from the group consisting of a 2′-O-(2-methoxyethyl) nucleoside, a 2′-O-methyl nucleoside, a 2′-O—(N-methylacetamide) nucleoside, a 2′-deoxy-2′-fluoro nucleoside, a 2′-fluoro-β-D-arabinonucleoside, locked nucleic acid (LNA), a tricyclic nucleic acid, constrained methoxyethyl (cMOE), constrained ethyl (cET), and a peptide nucleic acid (PNA), optionally wherein the oligonucleotide further comprises a spacer.

[0068] Additionally disclosed herein is a method for treating FTD in a subject in need thereof, the method comprising administering to the subject an oligonucleotide comprising a segment with at most 7 linked nucleosides, and wherein oligonucleotide shares at least 85% identity with any one of SEQ ID NOs: 1-1264, SEQ ID NOs: 2529-3792, SEQ ID NOs; 5066-5166, SEQ ID NOs: 5168-5202, SEQ ID NOs: 5209-5221, or SEQ ID NOs: 5235-5292, or a pharmaceutically acceptable salt thereof; wherein at least one (i.e., one or more) nucleoside linkage of the oligonucleotide is independently selected from the group consisting of: a phosphodiester linkage, a phosphorothioate linkage, an alkyl phosphate linkage, a phosphorodithioate linkage, a phosphotriester linkage, an alkylphosphonate linkage, a 3-methoxypropyl phosphonate linkage, a methylphosphonate linkage, an aminoalkylphosphotriester linkage, an alkylene phosphonate linkage, a phosphinate linkage, a phosphoramidate linkage, a phosphoramidothioate linkage, a thiophosphorodiamidate linkage, a phosphorodiamidate (e.g., comprising a phosphorodiamidate morpholino (PMO), 3′ amino ribose, or 5′ amino ribose) linkage, an aminoalkylphosphoramidate linkage, a thiophosphoramidate linkage, a thionoalkylphosphonate linkage, a thionoalkylphosphotriester linkage, a thiophosphate linkage, a selenophosphate linkage, and a boranophosphate linkage, and/or wherein at least one (i.e., one or more) nucleoside is substituted with a component selected from the group consisting of a 2′-O-(2-methoxyethyl) nucleoside, a 2′-O-methyl nucleoside, a 2′-O—(N-methylacetamide) nucleoside, a 2′-deoxy-2′-fluoro nucleoside, a 2′-fluoro-β-D-arabinonucleoside, locked nucleic acid (LNA), a tricyclic nucleic acid, constrained methoxyethyl (cMOE), constrained ethyl (cET), and a peptide nucleic acid (PNA), optionally wherein the oligonucleotide further comprises a spacer.

[0069] Additionally disclosed herein is a method for treating ALS with FTD in a subject in need thereof, the method comprising administering to the subject an oligonucleotide comprising a segment with at most 7 linked nucleosides, and wherein oligonucleotide shares at least 85% identity with any one of SEQ ID NOs: 1-1264, SEQ ID NOs: 2529-3792, SEQ ID NOs; 5066-5166, SEQ ID NOs: 5168-5202, SEQ ID NOs: 5209-5221, or SEQ ID NOs: 5235-5292, or a pharmaceutically acceptable salt thereof; wherein at least one (i.e., one or more) nucleoside linkage of the oligonucleotide is independently selected from the group consisting of: a phosphodiester linkage, a phosphorothioate linkage, an alkyl phosphate linkage, a phosphorodithioate linkage, a phosphotriester linkage, an alkylphosphonate linkage, a 3-methoxypropyl phosphonate linkage, a methylphosphonate linkage, an aminoalkylphosphotriester linkage, an alkylene phosphonate linkage, a phosphinate linkage, a phosphoramidate linkage, a phosphoramidothioate linkage, a thiophosphorodiamidate linkage, a phosphorodiamidate (e.g., comprising a phosphorodiamidate morpholino (PMO), 3′ amino ribose, or 5′ amino ribose) linkage, an aminoalkylphosphoramidate linkage, a thiophosphoramidate linkage, a thionoalkylphosphonate linkage, a thionoalkylphosphotriester linkage, a thiophosphate linkage, a selenophosphate linkage, and a boranophosphate linkage, and/or wherein at least one (i.e., one or more) nucleoside is substituted with a component selected from the group consisting of a 2′-O-(2-methoxyethyl) nucleoside, a 2′-O-methyl nucleoside, a 2′-O—(N-methylacetamide) nucleoside, a 2′-deoxy-2′-fluoro nucleoside, a 2′-fluoro-β-D-arabinonucleoside, locked nucleic acid (LNA), a tricyclic nucleic acid, constrained methoxyethyl (cMOE), constrained ethyl (cET), and a peptide nucleic acid (PNA), optionally wherein the oligonucleotide further comprises a spacer.

[0070] In various embodiments, one or more nucleoside linkages that link a base at position 3 or position 4 of the oligonucleotide are phosphodiester linkages. In various embodiments, only one nucleoside linkage that links a base at position 3 or position 4 of the oligonucleotide is a phosphodiester linkage. In various embodiments, nucleoside linkages that link bases at both position 3 and position 4 of the oligonucleotide are phosphodiester linkages. In various embodiments, one or more bases immediately preceding a spacer in the oligonucleotide are linked through phosphodiester bonds. In various embodiments, only the base immediately preceding the spacer in the oligonucleotide is linked to the spacer through a phosphodiester bond. In various embodiments, the base immediately preceding the spacer in the oligonucleotide is further linked to a further preceding base through a phosphodiester bond. In various embodiments, the oligonucleotide comprises a second spacer, wherein a base immediately preceding the second spacer is linked to a further preceding base through a phosphodiester bond.

[0071] In various embodiments, one or more bases immediately succeeding a spacer in the oligonucleotide are linked through phosphodiester bonds. In various embodiments, only the base immediately succeeding the spacer in the oligonucleotide is linked to the spacer through a phosphodiester bond. In various embodiments, two bases immediately preceding the spacer in the oligonucleotide are linked through phosphodiester bonds. In various embodiments, one or more bases immediately preceding a spacer in the oligonucleotide are linked through phosphodiester bonds and wherein one or more bases immediately succeeding the spacer in the oligonucleotide are linked through phosphodiester bonds. In various embodiments, one base immediately preceding the spacer and one base immediately succeeding the spacer are linked through phosphodiester bonds. In various embodiments, the oligonucleotide includes a second spacer, and wherein one or more bases immediately preceding the second spacer in the oligonucleotide are linked through phosphodiester bonds and wherein one or more bases immediately succeeding the second spacer in the oligonucleotide are linked through phosphodiester bonds. In various embodiments, one base immediately preceding the second spacer and one base immediately succeeding the second spacer are linked through phosphodiester bonds. In various embodiments, the oligonucleotide comprises a range of bases that are linked through phosphodiester bonds, the range of bases comprising at least two bases. In various embodiments, the oligonucleotide comprises a range of bases that are linked through phosphodiester bonds, the range of bases comprising at least five bases. In various embodiments, the oligonucleotide comprises two or more spacers, and wherein the range of bases are positioned between the at least two spacers. In various embodiments, the oligonucleotide is any one of a 19mer, 21mer, 23mer, or 25mer.

[0072] In various embodiments, at least one (i.e., one or more) internucleoside linkage of the oligonucleotide is a phosphorothioate linkage. In various embodiments, all internucleoside linkages of the oligonucleotide are phosphorothioate linkages.

[0073] Additionally disclosed herein is an oligonucleotide and a pharmaceutically acceptable excipient, the oligonucleotide comprising a sequence that is at least 85% complementary to an equal length portion of any one of SEQ ID NO: 5057-5065 or SEQ ID NOs: 5206-5208, a sequence having 90% identity thereof, or to a 15 to 50 contiguous nucleobase portion thereof, wherein the oligonucleotide comprises a spacer and wherein the oligonucleotide is capable of increasing, restoring, or stabilizing expression of the UNC13A mRNA capable of translation of a functional UNC13A and/or activity and/or function of UNC13A protein in a cell or a human patient of an immune-mediated demyelinating disease, and wherein the level of increase, restoration, or stabilization of expression and/or activity and/or function is sufficient for use of the oligonucleotide as a medicament for the treatment of the immune-mediated demyelinating disease.

[0074] In various embodiments, the oligonucleotide comprises one or more chiral centers and/or double bonds. In various embodiments, the oligonucleotide exist as stereoisomers selected from geometric isomers, enantiomers, and diastereomers.

[0075] Additionally disclosed herein is a method of treating a neurological disease and/or a neuropathy in a patient in need thereof, the method comprising administering to a patient in need thereof a therapeutically effective amount of a pharmaceutical composition disclosed above, in combination with a second therapeutic agent. In various embodiments, the second therapeutic agent is selected from Riluzole (Dilute), PrimeC (combination of celecoxib and ciprofloxacin), Edaravone (Radicava), rivastigmine, donepezil, galantamine, selective serotonin reuptake inhibitor, antipsychotic agents, cholinesterase inhibitors, memantine, benzodiazepine antianxiety drugs, AMX0035 (ELYBRIO), ZILUCOPLAN (RA101495), pridopidine, dual AON intrathecal administration (e.g., B11B067, BIIB078, and B11B105), BIIB100, levodopa/carbidopa, dopaminergic agents (e.g., ropinirole, pramipexole, rotigotine), medroxyprosterone, KCNQ2/KCNQ3 openers (e.g., retigabine, XEN1101, QRL-101), anticonvulsants and psychostimulant agents, and/or a therapy (e.g., selected from breathing care, physical therapy, occupational therapy, speech therapy, nutritional support), for treating said neurologic disease.

[0076] Additionally disclosed herein is a method of treating a neurological disease and/or a neuropathy in a patient in need thereof, the method comprising administering to a patient in need thereof a therapeutically effective amount of a pharmaceutical composition disclosed above, wherein at least one (i.e., one or more) nucleoside linkage of the oligonucleotide is a non-natural linkage, wherein the oligonucleotide comprises a spacer, and wherein the oligonucleotide further comprises a targeting or conjugate moiety selected from cholesterol, lipoic acid, panthothenic acid, polyethylene glycol, and an antibody for crossing the blood brain barrier.

[0077] In various embodiments, the spacer is a nucleoside-replacement group comprising a non-sugar substitute that is incapable of linking to a nucleotide base. In various embodiments, the spacer is located between positions 10 and 15 of the oligonucleotide. In various embodiments, the spacer is located between positions 7 and 11 of the oligonucleotide. In various embodiments, the oligonucleotide further comprises a second spacer, wherein the second spacer is located between positions 14 and 22 of the oligonucleotide. In various embodiments, the spacer and the second spacer are separated by at least 5 nucleobases, at least 6 nucleobases, or at least 7 nucleobases in the oligonucleotide. In various embodiments, the spacer is located between positions 7 and 9 of the oligonucleotide, and wherein the second spacer is located between positions 15 and 18 of the oligonucleotide. In various embodiments, the spacer is located at position 8 of the oligonucleotide, and wherein the second spacer is located at position 16 of the oligonucleotide.

[0078] In various embodiments, the oligonucleotide further comprises a third spacer, wherein the third spacer is located between positions 21 and 24 of the oligonucleotide. In various embodiments, the spacer is located between positions 2 and 5 of the oligonucleotide. In various embodiments, the oligonucleotide further comprises a second spacer, wherein the second spacer is located between positions 8 and 12 of the oligonucleotide. In various embodiments, the oligonucleotide further comprises a third spacer, wherein the third spacer is located between positions 18 and 22 of the oligonucleotide. In various embodiments, the oligonucleotide further comprises a second spacer and a third spacer, wherein the three spacers are located at positions in the oligonucleotide such that each segment of the oligonucleotide has at most 7 linked nucleosides.

[0079] In various embodiments, at least two of the three spacers are adjacent to a guanine nucleobase. In various embodiments, each of the at least two of the three spacers immediately precede a guanine nucleobase.

[0080] In various embodiments, of the methods described herein, each of the first, second or third spacers is a nucleoside-replacement group comprising a non-sugar substitute wherein the non-sugar substitute does not contain a ketone, aldehyde, ketal, hemiketal, acetal, hemiacetal, aminal or hemiaminal moiety and is incapable of forming a covalent bond with a nucleotide base.

[0081] In certain embodiments, each of the first, second or third spacers is independently represented by Formula (X), wherein:

[chemical structure]

[0082] Ring A is an optionally substituted 4-8 member monocyclic cycloalkyl group or a 4-8 member monocyclic heterocyclyl group, wherein the heterocyclyl group contains 1 or 2 heteroatoms selected from O, S and N, provided that A is not capable of forming a covalent bond to a nucleobase; and
[0083] the

[chemical structure]

symbol represents the point of connection to an internucleoside linkage.

[0084] In various embodiments, each of the first, second or third spacers is independently represented by Formula (Xa), wherein:

[chemical structure]

[0085] In some embodiments, ring A is an optionally substituted 4-8 member monocyclic cycloalkyl group selected from cyclobutyl, cyclopentyl, cyclohexyl, cycloheptyl and cyclooctyl; or a 4-8 member monocyclic heterocyclyl group, selected from oxetanyl, tetrahydrofuranyl, tetrahydropyranyl, 1,4-dioxanyl, pyrolidinyl, piperidinyl, piperazinyl, morpholinyl and azepanyl.

[0086] In further embodiments, ring A is tetrahydrofuranyl.

[0087] In other embodiments, ring A is tetrahydropyranyl.

[0088] In various embodiments, each of the first, second or third spacers is independently represented by Formula (I), wherein:

[chemical structure]

[0089] X is selected from —CH₂— and —O—; and
[0090] n is 0, 1, 2 or 3.

[0091] In various embodiments, the spacer or the second spacer is represented by Formula (I′), wherein:

[chemical structure]

[0092] X is selected from —CH₂— and —O—; and
[0093] n is 0, 1, 2 or 3.

[0094] In various embodiments, each of the first, second or third spacers is independently represented by Formula (Ia), wherein:

[chemical structure]

and
[0095] n is 0, 1, 2 or 3.

[0096] In various embodiments, each of the first, second or third spacers is independently represented by Formula (Ia′), wherein:

[chemical structure]

and
[0097] n is 0, 1, 2 or 3.

[0098] In certain embodiments, each of the first, second or third spacers is independently represented by Formula II, wherein:

[chemical structure]

and
[0099] X is selected from —CH₂— and —O—.

[0100] In further embodiments, each of the first, second or third spacers is independently represented by Formula II′, wherein:

[chemical structure]

and
[0101] X is selected from —CH₂— and —O—.

[0102] In various embodiments, each of the first, second or third spacers is independently represented by Formula (Iia), wherein:

[chemical structure]

[0103] In further embodiments, each of the first, second or third spacers is independently represented by Formula (Iia′), wherein:

[chemical structure]

[0104] In some embodiments, the spacer is represented by Formula (IIi), wherein:

[chemical structure]

[0105] X is selected from —CH₂— and —O—.

[0106] In some embodiments, the spacer is represented by Formula (IIi′), wherein:

[chemical structure]

[0107] X is selected from —CH₂— and —O.

[0108] In some embodiments, the spacer is represented by Formula (IIib), wherein:

[chemical structure]

[0109] In some embodiments, the spacer is represented by Formula (Iiib′), wherein:

[chemical structure]

[0110] In various embodiments, each of the first, second or third spacers is independently represented by Formula III, wherein:

[chemical structure]

and
[0111] X is selected from —CH₂— and —O—.

[0112] In further embodiments, each of the first, second or third spacers is independently represented by Formula III′, wherein:

[chemical structure]

and
[0113] X is selected from —CH₂— and —O—.

[0114] In some embodiments, each of the first, second or third spacers is independently represented by Formula (IIIa), wherein:

[chemical structure]

[0115] In further embodiments, each of the first, second or third spacers is independently represented by Formula (IIIa′), wherein:

[chemical structure]

[0116] In various embodiments, the oligonucleotide comprising the spacer has a GC content of at least 10%. In various embodiments, the oligonucleotide comprising the spacer has a GC content of at least 20%. In various embodiments, the oligonucleotide comprising the spacer has a GC content of at least 25%. In various embodiments, the oligonucleotide comprising the spacer has a GC content of at least 30%. In various embodiments, the oligonucleotide comprising the spacer has a GC content of at least 40%. In various embodiments, the oligonucleotide comprising the spacer has a GC content of at least 50%.

### BRIEF DESCRIPTION OF THE DRAWINGS

[0117] FIG. 1 shows an example antisense oligonucleotide (AON), a portion of which is complementary to a mRNA transcript or pre-mRNA transcript. Dashed lines indicate positions of the AON which may or may not be occupied by a spacer.

### DETAILED DESCRIPTION

[0118] The features and other details of the disclosure will now be more particularly described. Certain terms employed in the specification, examples and appended claims are collected here. These definitions should be read in light of the remainder of the disclosure and understood as by a person of skill in the art. Unless defined otherwise, all technical and scientific terms used herein have the same meaning as commonly understood by a person of ordinary skill in the art.

[0119] Disclosed herein are oligonucleotides capable of targeting a region of a transcript transcribed from a gene. In various embodiments, such oligonucleotides target a UNC13A transcript. Additionally disclosed herein are oligonucleotides, including antisense oligonucleotide sequences, and methods for treating neurological diseases, such as amyotrophic lateral sclerosis and frontotemporal dementia, and/or neuropathies such as chemotherapy induced neuropathy, using same. In various embodiments, the oligonucleotides target a sequence of UNC13A transcripts resulting in the reduction of levels of mis-spliced UNC13A transcripts Also disclosed are pharmaceutical compositions comprising UNC13A oligonucleotides that target a region of UNC13A transcripts, for treating neurological diseases and/or neuropathies; and manufacture of medicaments containing a disclosed UNC13A oligonucleotide that targets a region of UNC13A transcripts to be used in treating a neurological disease and/or neuropathy.

### Definitions

[0120] The terms “treat,” “treatment,” “treating,” and the like are used herein to generally mean obtaining a desired pharmacological and/or physiological effect. The effect may be therapeutic in terms of partially or completely curing a disease and/or adverse effect attributed to the disease. The term “treatment” as used herein covers any treatment of a disease in a mammal, particularly a human, and includes: (a) inhibiting the disease, i.e., preventing the disease from increasing in severity or scope; (b) relieving the disease, i.e., causing partial or complete amelioration of the disease; or (c) preventing relapse of the disease, i.e., preventing the disease from returning to an active state following previous successful treatment of symptoms of the disease or treatment of the disease.

[0121] “Preventing” includes delaying the onset of clinical symptoms, complications, or biochemical indicia of the state, disorder, disease, or condition developing in a subject that may be afflicted with or predisposed to the state, disorder, disease, or condition but does not yet experience or display clinical or subclinical symptoms of the state, disorder, disease, or condition. “Preventing” includes prophylactically treating a state, disorder, disease, or condition in or developing in a subject, including prophylactically treating clinical symptoms, complications, or biochemical indicia of the state, disorder, disease, or condition in or developing in a subject.

[0122] The term “pharmaceutically acceptable carrier” or “pharmaceutically acceptable excipient” as used herein interchangeably refers to any and all solvents, dispersion media, coatings, isotonic and absorption delaying agents, and the like, that are compatible with pharmaceutical administration. The use of such media and agents for pharmaceutically active substances is well known in the art. The compositions may also contain other active compounds providing supplemental, additional, or enhanced therapeutic functions.

[0123] The term “pharmaceutical composition” as used herein refers to a composition comprising at least one biologically active compound, for example, a UNC13A antisense oligonucleotide (AON), as disclosed herein formulated together with one or more pharmaceutically acceptable excipients.

[0124] “Individual,” “patient,” or “subject” are used interchangeably and include any animal, including mammals, preferably mice, rats, other rodents, rabbits, dogs, cats, swine, cattle, sheep, horses, or non-human primates, and most preferably humans. The compounds of the invention can be administered to a mammal, such as a human, but can also be other mammals such as an animal in need of veterinary treatment, e.g., domestic animals (e.g., dogs, cats, and the like), farm animals (e.g., cows, sheep, pigs, horses, and the like) and laboratory animals (e.g., rats, mice, guinea pigs, non-human primates, and the like). In some embodiments, the mammal treated in the methods of the invention is desirably a mammal in whom modulation of UNC13A expression and/or activity is desired.

[0125] As used herein, “UNC13A” (also known as Unc-13 Homolog A, Munc13-1, KIAA1032, unc-13 homolog A (C. elegans), or Protein Unc-13 Homolog A) refers to the gene or gene products (e.g., protein or mRNA transcript (including pre-mRNA) encoded by the gene) identified by Entrez Gene ID No. 23025 and allelic variants thereof, as well as orthologs found in non-human species (e.g., non-human primates or mice).

[0126] The term “UNC13A transcript” refers to a UNC13A transcript which can be a UNC13A pre-mRNA sequence or a UNC13A mature RNA sequence. UNC13A transcript sequences are shown to contain thymine (T), but one of skill in the art will appreciate that thymine (T) can generally be replaced with uracil (U) in RNA sequences.

[0127] The term “UNC13A oligonucleotide,” “UNC13A antisense oligonucleotide,” or “UNC13A AON” refers to an oligonucleotide that is capable of increasing, restoring, or stabilizing full-length UNC13A activity e.g., full length UNC13A expression, for example, full length UNC13A mRNA and/or full length UNC13A protein expression. Generally, a UNC13A oligonucleotide reduces the level of mis-spliced UNC13A transcripts by targeting a UNC13A transcript (e.g., UNC13A pre-mRNA or mis-spliced UNC13A with a target sequence). In various embodiments, a UNC13A oligonucleotide comprises a sequence that is at least 85% complementary to an equal length portion of a transcript comprising a sequence at least 90% identity to SEQ ID NO: 5057-5065 or SEQ ID NOs: 5206-5208, or a contiguous 15 to 50 nucleobase portion of SEQ ID NO: 5057-5065 or SEQ ID NOs: 5206-5208. UNC13A target sequences are shown to contain thymine (T), but one of skill in the art will appreciate that thymine (T) can generally be replaced with uracil (U) in RNA sequences.

[0128] In various embodiments, UNC13A oligonucleotides are characterized by having one or more spacers, where each spacer divides up the UNC13A oligonucleotide into segments of linked nucleosides. In various embodiments, UNC13A oligonucleotides have two spacers. In one embodiment, UNC13A oligonucleotides have two segments of linked nucleosides separated by one spacer. In one embodiment, UNC13A oligonucleotides have three segments of linked nucleosides separated by two spacers. In such embodiments, UNC13A oligonucleotides have one segment with at most 7 linked nucleosides. For example, a UNC13A oligonucleotide may have, from the 5′ to the 3′ end, 5 linked nucleosides, followed by a spacer, 10 linked nucleosides, followed by a second spacer, and 8 linked nucleosides. Thus, the first segment of 5 linked nucleosides satisfies the one segment with at most 7 linked nucleosides. In various embodiments, UNC13A oligonucleotides have three spacers that divide the UNC13A oligonucleotide into four segments. In various embodiments, each of the four segments of the UNC13A oligonucleotide have at most 7 linked nucleosides.

[0129] As used herein, the term “UNC13A oligonucleotide” encompasses a “UNC13A parent oligonucleotide,” a “UNC13A oligonucleotide with one or more spacers” (e.g., UNC13A oligonucleotide with two spacers or a UNC13A oligonucleotide with three spacers), a “UNC13A oligonucleotide variant with one or more spacers.” Examples of UNC13A oligonucleotides include oligonucleotides comprising a sequence of any one of SEQ ID NOs: 1-1264, SEQ ID NO: 2529-3792, SEQ ID NOs: 5066-5166, SEQ ID NOs: 5168-5202, SEQ ID NOs: 5209-5221, or SEQ ID NOs: 5235-5292.

[0130] The term “UNC13A parent oligonucleotide” refers to an oligonucleotide that targets a UNC13A transcript and is capable of increasing, restoring, or stabilizing full-length UNC13A activity e.g., full length UNC13A expression, for example, full length UNC13A mRNA and/or full length UNC13A protein expression. UNC13A parent oligonucleotides do not include a spacer. Examples of UNC13A parent oligonucleotides include oligonucleotides comprising a sequence of any one of SEQ ID NO: 1-1264. As described hereafter, UNC13A oligonucleotide with spacers and UNC13A oligonucleotide variants are described in relation to a corresponding UNC13A parent oligonucleotide.

[0131] The term “UNC13A oligonucleotide variant” refers to a UNC13A oligonucleotide that represents a modified version of a corresponding UNC13A parent oligonucleotide. For example, a UNC13A oligonucleotide variant represents a shortened version of a UNC13A parent oligonucleotide. In various embodiments, a UNC13A oligonucleotide variant is any one of a 15mer, 16mer, 17mer, 18mer 19mer, 20mer, 21mer, 22mer 23mer, 24mer, 25mer, 26mer, or 27mer. Examples of UNC13A oligonucleotide variants include oligonucleotides comprising a sequence of any one of SEQ ID NO: 2529-3792. In various embodiments, UNC13A oligonucleotide variants comprise one or more spacers. Such UNC13A oligonucleotide variants comprise a sequence of any one of SEQ ID NO: 5066-5166, SEQ ID NOs: 5168-5202, SEQ ID NOs: 5209-5221, or SEQ ID NOs: 5235-5292.

[0132] The term “oligonucleotide with one or more spacers” or “oligonucleotide comprising a spacer” refers to an oligonucleotide with at least one spacer. An oligonucleotide with one or more spacers can, in various embodiments, include one spacer, two spacers, three spacers, four spacer, five spacers, six spacers, seven spacers, eight spacers, nine spacers, or ten spacers. In various embodiments, an oligonucleotide comprising one or more spacers includes at least one segment with at most 7 linked nucleosides. For example, as described in a 5′ to 3′ direction, an oligonucleotide comprising a spacer can include a segment with 7 linked nucleosides, followed by a spacer, a second segment with 9 linked nucleosides, followed by a second spacer, and a third segment with 7 linked nucleosides. Here, the first segment of 7 linked nucleosides and the third segment of 7 linked nucleosides each represents segments with at most 7 linked nucleosides. As another example, an oligonucleotide comprising a spacer can include a segment with 10 linked nucleosides, followed by a spacer, a second segment with 10 linked nucleosides, followed by a second spacer, and a third segment with 3 linked nucleosides. Here, the third segment of 3 linked nucleosides represents the segment with at most 7 linked nucleosides. In various embodiments, an oligonucleotide with one or more spacers includes multiple segments with at most 7 linked nucleosides. In various embodiments, every segment of an oligonucleotide with one or more spacers has at most 7 linked nucleosides. For example, the oligonucleotide may be a 23mer and include two spacers that divide the 23mer into three separate segments of 7 linked nucleosides each. Therefore, each segment of the oligonucleotide has at most 7 linked nucleosides.

[0133] Generally, UNC13A oligonucleotides comprising one or more spacers are described in reference to a corresponding UNC13A parent oligonucleotide or a corresponding UNC13A oligonucleotide variant. Example UNC13A oligonucleotides comprising one or more spacers include any of SEQ ID NOs: 5066-5166, SEQ ID NOs: 5168-5202, SEQ ID NOs: 5209-5221, or SEQ ID NOs: 5235-5292.

[0134] In various embodiments, one or more spacers may be located at one or more positions of an oligonucleotide. A spacer may be located between a first position and a second position of the oligonucleotide. As used herein, a spacer located between a first position and second position encompasses the spacer being located at the first position, located at the second position, or located at any position of the oligonucleotide sandwiched by the first position and the second position.

[0135] In the present specification, the term “therapeutically effective amount” means the amount of an oligonucleotide that will elicit the biological or medical response of a tissue, system, animal or human that is being sought by the researcher, veterinarian, medical doctor, or other clinician. In one embodiment, the oligonucleotide comprises a sequence that is at least 85% complementary to an equal length portion of a transcript comprising a sequence at least 90% identity to SEQ ID NO: 5057-5065 or SEQ ID NOs: 5206-5208, or a contiguous 15 to 50 nucleobase portion of SEQ ID NO: 5057-5065 or SEQ ID NOs: 5206-5208. The oligonucleotide is administered in therapeutically effective amounts to treat and/or prevent a disease, condition, disorder, or state, for example, a neurological disease and/or a neuropathy. Alternatively, a therapeutically effective amount of an oligonucleotide is the quantity required to achieve a desired therapeutic and/or prophylactic effect, such as an amount which results in the prevention of or a decrease in the symptoms associated with a disease associated with reduced UNC13A activity in the motor neurons.

[0136] The phrase “a UNC13A oligonucleotide that targets a UNC13A transcript” refers to a UNC13A oligonucleotide that binds to a UNC13A transcript

[0137] The term “pharmaceutically acceptable salt(s)” as used herein refers to salts of acidic or basic groups that may be present in a UNC13A oligonucleotide used in the present compositions. A UNC13A oligonucleotide included in the present compositions that are basic in nature are capable of forming a wide variety of salts with various inorganic and organic acids. The acids that may be used to prepare pharmaceutically acceptable acid addition salts of such basic compounds are those that form non-toxic acid addition salts, i.e., salts containing pharmacologically acceptable anions, including but not limited to malate, oxalate, chloride, bromide, iodide, nitrate, sulfate, bisulfate, phosphate, acid phosphate, isonicotinate, acetate, lactate, salicylate, citrate, tartrate, oleate, tannate, pantothenate, bitartrate, ascorbate, succinate, maleate, gentisinate, fumarate, gluconate, glucuronate, saccharate, formate, benzoate, glutamate, methanesulfonate, ethanesulfonate, benzenesulfonate, p-toluenesulfonate and pamoate (i.e., 1,1′-methylene-bis-(2-hydroxy-3-naphthoate)) salts. A UNC13A oligonucleotide included in the present compositions that include an amino moiety may form pharmaceutically acceptable salts with various amino acids, in addition to the acids mentioned above. Compounds included in the present compositions that are acidic in nature are capable of forming base salts with various pharmacologically acceptable cations. Examples of such salts include alkali metal or alkaline earth metal salts and, particularly, calcium, magnesium, sodium, and lithium salts. Pharmaceutically acceptable salts of the disclosure include, for example, pharmaceutically acceptable salts of UNC13A oligonucleotides that include a sequence of any of SEQ ID NOs: 1-1264, SEQ ID NOs: 2529-3792, SEQ ID NOs: 5066-5166, SEQ ID NOs: 5168-5202, SEQ ID NOs: 5209-5221, or SEQ ID NOs: 5235-5292.

[0138] A UNC13A oligonucleotide of the disclosure may contain one or more chiral centers, groups, linkages, and/or double bonds and, therefore, exist as stereoisomers, such as geometric isomers, enantiomers or diastereomers. The term “stereoisomers” when used herein consist of all geometric isomers, enantiomers or diastereomers. These compounds may be designated by the symbols “R” or “S” (or “Rp” or “Sp”) depending on the configuration of substituents around the stereogenic atom, for example, a stereogenic carbon, phosphorous, or sulfur atom. In some embodiments, one or more linkages of the compound may have a Rp or Sp configuration (e.g., one or more phosphorothioate linkages have either a Rp or Sp configuration). The configuration of each phosphorothioate linkage may be independent of another phosphorothioate linkage (e.g., one phosphorothioate linkage has a Rp configuration and a second phosphorothioate linkage has a Sp configuration). In various embodiments, the UNC13A oligonucleotide can have a mixed configuration of phosphorothioate linkages. For example, the UNC13A oligonucleotide may have five phosphorothioate linkages in a Rp configuration, followed by fifteen phosphorothioate linkages in a Sp configuration, followed by five phosphorothioate linkages in a Rp configuration. The present invention encompasses various stereoisomers of these compounds and mixtures thereof. Stereoisomers include enantiomers and diastereomers. Mixtures of enantiomers or diastereomers may be designated “(±)” in nomenclature, but the skilled artisan will recognize that a structure may denote a chiral center implicitly.

[0139] Individual stereoisomers of a UNC13A oligonucleotide of the present invention can be prepared synthetically from commercially available starting materials that contain asymmetric or stereogenic centers, or by preparation of racemic mixtures followed by resolution methods well known to those of ordinary skill in the art. These methods of resolution are exemplified by (1) attachment of a mixture of enantiomers to a chiral auxiliary, separation of the resulting mixture of diastereomers by recrystallization or chromatography and liberation of the optically pure product from the auxiliary, (2) salt formation employing an optically active resolving agent, or (3) direct separation of the mixture of optical enantiomers on chiral chromatographic columns. Stereoisomeric mixtures can also be resolved into their component stereoisomers by well-known methods, such as chiral-phase gas chromatography, chiral-phase super critical fluid chromatography, chiral-phase simulated moving bed chromatography, chiral-phase high performance liquid chromatography, crystallizing the compound as a chiral salt complex, or crystallizing the compound in a chiral solvent. Stereoisomers can also be obtained from stereomerically-pure intermediates, reagents, and catalysts by well-known asymmetric synthetic methods.

[0140] The UNC13A oligonucleotide disclosed herein can exist in solvated as well as unsolvated forms with pharmaceutically acceptable solvents such as water, ethanol, and the like, and it is intended that the invention embrace both solvated and unsolvated forms.

[0141] The disclosure also embraces fluorescently labeled compounds of the invention. The disclosure also embraces isotopically labeled compounds of the invention (i.e., isotopically labeled UNC13A oligonucleotide) which are identical to those recited herein, except that one or more atoms are replaced by an atom having an atomic mass or mass number different from the atomic mass or mass number abundantly found in nature. Examples of isotopes that can be incorporated into compounds of the invention include isotopes of hydrogen, carbon, nitrogen, oxygen, phosphorus, fluorine and chlorine, such as ²H, ³H, ¹¹C, ¹³C, ¹⁴C, ¹⁵N, ¹⁸O, ¹⁷O, ³¹P, ³²P, ³³P, ³⁵S, ¹⁸F, and ³⁶Cl, respectively.

[0142] Certain isotopically labeled disclosed compounds (e.g., those labeled with ³H, ¹⁴C, or ³⁵S) are useful in compound and/or substrate tissue distribution assays. Tritiated (i.e., ³H), carbon-14 (i.e., ¹⁴C) isotopes are particularly preferred for their ease of preparation and detectability. Further, substitution with heavier isotopes such as deuterium (i.e., ²H) may afford certain therapeutic advantages resulting from greater metabolic stability (e.g., increased in vivo half-life or reduced dosage requirements) and hence may be preferred in some circumstances.

[0143] As used herein, “2′-O-(2-methoxyethyl)” (also 2′-MOE and 2′-O(CH₂)₂OCH₃ and MOE) refers to an O-methoxyethyl modification of the 2′ position of a furanose ring. A 2′-O-(2-methoxyethyl) is used interchangeably as “2′-O-methoxyethyl” in the present disclosure. A sugar moiety in a nucleoside modified with 2′-MOE is a modified sugar.

[0144] As used herein, “2′-MOE nucleoside” (also 2′-O-(2-methoxyethyl) nucleoside) means a nucleoside comprising a 2′-MOE modified sugar moiety.

[0145] As used herein, “2′-substituted nucleoside” means a nucleoside comprising a substituent at the 2′-position of the furanose ring other than H or OH. In certain embodiments, 2′ substituted nucleosides include nucleosides with bicyclic sugar modifications.

[0146] As used herein, “5-methyl cytosine” (5-MeC) means a cytosine modified with a methyl group attached to the 5 position. A 5-methyl cytosine (5-MeC) is a modified nucleobase.

[0147] As used herein, “bicyclic sugar” means a furanose ring modified by the bridging of two atoms. A bicyclic sugar is a modified sugar.

[0148] As used herein, “bicyclic nucleoside” (also BNA) means a nucleoside having a sugar moiety comprising a bridge connecting two carbon atoms of the sugar ring, thereby forming a bicyclic ring system. In certain embodiments, the bridge connects the 4′-carbon and the 2′-carbon of the sugar ring.

[0149] As used herein, “cap structure” or “terminal cap moiety” means chemical modifications, which have been incorporated at either terminus of an antisense compound.

[0150] As used herein, “cEt” or “constrained ethyl” means a bicyclic nucleoside having a sugar moiety comprising a bridge connecting the 4′-carbon and the 2′-carbon, wherein the bridge has the formula: 4′-CH(CH₃)—O-2′.

[0151] As used herein, “constrained ethyl nucleoside” (also cEt nucleoside) means a nucleoside comprising a bicyclic sugar moiety comprising a 4′-CH(CH₃)—O-2′ bridge. In some embodiments, cEt can be modified. In some embodiments, the cEt can be S-cEt (in an S-constrained ethyl 2′-4′-bridged nucleic acid). In some other embodiments, the cEt can be R-cEt.

[0152] As used herein, “internucleoside linkage” refers to the covalent linkage between adjacent nucleosides in an oligonucleotide. In some embodiments, as used herein, “non-natural linkage” refers to a “modified internucleoside linkage.”

[0153] As used herein, “contiguous” in the context of an oligonucleotide refers to nucleosides, nucleobases, sugar moieties, or internucleoside linkages that are immediately adjacent to each other. For example, “contiguous nucleobases” means nucleobases that are immediately adjacent to each other in a sequence. As an example to the contrary, two nucleosides separated by a spacer are not contiguous.

[0154] As used herein, “locked nucleic acid” or “LNA” or “LNA nucleosides” means nucleic acid monomers having a bridge (e.g., methylene, ethylene, aminooxy, or oxyimino bridge) connecting two carbon atoms between the 4′ and 2′ position of the nucleoside sugar unit, thereby forming a bicyclic sugar. Examples of such bicyclic sugar include, but are not limited to (A) α-L-Methyleneoxy (4′—CH₂—O-2′) LNA, (B) β-D-Methyleneoxy (4′—CH₂—O-2′) LNA, (C) Ethyleneoxy (4′—(CH₂)₂-O-2′) LNA, (D) Aminooxy (4′—CH₂—O—N(R)-2′) LNA and (E) Oxyamino (4′—CH₂—N(R)—O-2′) LNA; wherein R is H, C₁-C₁₂ alkyl, or a protecting group (see U.S. Pat. No. 7,427,672, issued on Sep. 23, 2008).

[0155] As used herein, LNA compounds include, but are not limited to, compounds having at least one bridge between the 4′ and the 2′ position of the sugar wherein each of the bridges independently comprises 1 or from 2 to 4 linked groups independently selected from —[C(R₁)(R₂)]ₙ—, —C(R₁)═C(R₂)—, —C(R₁)═N—, —C(═NR₁)—, —C(═O)—, —C(═S)—, —O—, —Si(R₁)₂—, —S(═O)ₓ— and —N(R₁)—; wherein: x is 0, 1, or 2; n is 1, 2, 3, or 4; each R₁ and R₂ is, independently, H, a protecting group, hydroxyl, C₁-C₁₂ alkyl, substituted C₁-C₁₂ alkyl, C₂-C₁₂ alkenyl, substituted C₂-C₁₂ alkenyl, C₂-C₁₂ alkynyl, substituted C₂-C₁₂ alkynyl, C₅-C₂₀ aryl, substituted C₅-C₂₀ aryl, a heterocycle radical, a substituted heterocycle radical, heteroaryl, substituted heteroaryl, C₅-C₇ alicyclic radical, substituted C₅-C₇ alicyclic radical, halogen, OJ₁, NJ₁J₂, SJ₁, N₃, COOJ₁, acyl (C(═O)—H), substituted acyl, CN, sulfonyl (S(═O)₂-J₁), or sulfoxyl (S(═O)-J₁); and each J₁ and J₂ is, independently, H, C₁-C₁₂ alkyl, substituted C₁-C₁₂ alkyl, C₂-C₁₂ alkenyl, substituted C₂-C₁₂ alkenyl, C₂-C₁₂ alkynyl, substituted C₂-C₁₂ alkynyl, C₅-C₂₀ aryl, substituted C₅-C₂₀ aryl, acyl (C(═O)—H), substituted acyl, a heterocycle radical, a substituted heterocycle radical, C₁-C₁₂ aminoalkyl, substituted C₁-C₁₂ aminoalkyl or a protecting group.

[0156] Examples of 4′-2′ bridging groups encompassed within the definition of LNA include, but are not limited to one of formulae: —[C(R₁)(R₂)]ₙ—, —[C(R₁)(R₂)]ₙ—O—, —C(R₁R₂)—N(R₁)—O— or —C(R₁R₂)—O—N(R₁)—. Furthermore, other bridging groups encompassed with the definition of LNA are 4′—CH₂-2′,4′—(CH₂)₂-2′,4′—(CH₂)₃-2′,4′—CH₂—O-2′,4′—(CH₂)₂—O-2′,4′—CH₂—O—N(R₁)—O-2′ and 4′—CH₂—N(R₁)—O-2′— bridges, wherein each R₁ and R₂ is, independently, H, a protecting group or C₁-C₁₂ alkyl.

[0157] Also included within the definition of LNA according to the invention are LNAs in which the 2′-hydroxyl group of the ribosyl sugar ring is connected to the 4′ carbon atom of the sugar ring, thereby forming a bridge to form the bicyclic sugar moiety. The bridge can be a methylene (—CH₂—) group connecting the 2′ oxygen atom and the 4′ carbon atom, for which the term methyleneoxy (4′—CH₂—O-2′) LNA is used. Furthermore, in the case of the bicyclic sugar moiety having an ethylene bridging group in this position, the term ethyleneoxy (4′-CH₂CH₂—O-2′) LNA is used.

[0158] As used herein, a “spacer” refers to a nucleoside-replacement group (e.g., a non-nucleoside group that replaces a nucleoside present in a UNC13A parent oligonucleotide). The spacer is characterized by the lack of a nucleotide base and by the replacement of the nucleoside sugar moiety with a non-sugar substitute. The non-sugar substitute group of a spacer lacks an aldehyde, ketone, acetal, ketal, hemiacetal or hemiketal group. The non-sugar substitute group of a spacer is thus capable of connecting to the 3′ and 5′ positions of the nucleosides adjacent to the spacer through an internucleoside linker as described herein, but not capable of forming a covalent bond with a nucleotide base (i.e., not capable of linking a nucleobase to another group, such as an internucleoside linkage, conjugate group, or terminal group in an oligonucleotide). Generally, a UNC13A oligonucleotide with a spacer is described in relation to a UNC13A parent oligonucleotide, wherein the spacer replaces a nucleoside of the UNC13A parent oligonucleotide. In all embodiments of the present disclosure, a spacer cannot hybridize to a nucleoside comprising a nucleobase at the corresponding position of a UNC13A transcript, within the numerical order of the length of the AON oligonucleotide (i.e., if the spacer is positioned after nucleoside 4 of an AON (i.e., at position 5 from the 5′-end), the spacer is not complementary to the nucleoside (A, C, G, or U) at the same corresponding position of the target UNC13A transcript)).

[0159] As used herein, “mismatch” or a “non-complementary group” refers to the case when a group (e.g., nucleobase) of a first nucleic acid is not capable of pairing with the corresponding group (e.g., nucleobase) of a second or target nucleic acid.

[0160] As used herein, “modified internucleoside linkage” refers to a substitution or any change from a naturally occurring internucleoside linkage (e.g., a phosphodiester internucleoside bond).

[0161] As used herein, “modified nucleobase” means any nucleobase other than adenine, cytosine, guanine, thymine, or uracil. Examples of a modified nucleobase include 5-methyl cytosine, pseudouridine, or 5-methoxyuridine. An “unmodified nucleobase” means the purine bases adenine (A) and guanine (G), and the pyrimidine bases thymine (T), cytosine (C), and uracil (U).

[0162] As used herein, a “modified nucleoside” means a nucleoside having, independently, a modified sugar moiety and/or modified nucleobase. A universal base is a modified nucleobase that can pair with any one of the five unmodified nucleobases. Modified nucleosides include abasic nucleosides, which lack a nucleobase. However, modified nucleosides do not include spacers or other groups that are incapable of linking a nucleobase.

[0163] As used herein, “linked nucleosides” are nucleosides that are connected in a contiguous sequence (i.e., no additional nucleosides are presented between those that are linked). In various embodiments, an oligonucleotide may have different segments of linked nucleosides connected through a spacer. Here, the spacer (i.e., nucleoside replacement) is not considered a nucleoside and therefore, divides up the oligonucleotide into two segments of linked nucleosides. The oligonucleotide may have a first segment of Y linked nucleosides (e.g., Y nucleosides that are connected in a contiguous sequence), followed by a spacer, and then a second segment of Z linked nucleosides. Here, the Y and Z linked nucleosides is described in either the 5′ to 3′ direction or the 3′ to 5′ direction. In various embodiments, the first segment consists of 7 or fewer linked nucleosides (e.g., Y=7 or fewer) whereas the second segment comprises 8 or more linked nucleosides (e.g., Z=8 or more).

[0164] As used herein, “modified oligonucleotide” means an oligonucleotide comprising at least one (i.e., one or more) modified internucleoside linkage, modified sugar, and/or modified nucleobase.

[0165] As used herein, “modified sugar” or “modified sugar moiety” means a modified furanosyl sugar moiety or a modified sugar moiety having other than a furanosyl moiety that can link a nucleobase to another group, such as an internucleoside linkage, conjugate group, or terminal group in an oligonucleotide.

[0166] As used herein, “monomer” means a single unit of an oligomer. Monomers include, but are not limited to, nucleosides and nucleotides, whether naturally occurring or modified.

[0167] As used herein, “motif” means the pattern of unmodified and modified nucleosides in an antisense compound.

[0168] As used herein, “natural sugar moiety” means a sugar moiety found in DNA (2′-H) or RNA (2′-OH).

[0169] As used herein, “naturally occurring internucleoside linkage” means a 3′ to 5′ phosphodiester linkage.

[0170] As used herein, “non-complementary nucleobases” refers to a pair of nucleobases that do not form hydrogen bonds with one another or otherwise support hybridization.

[0171] As used herein, “nucleic acid” refers to molecules composed of monomeric nucleotides. A nucleic acid includes, but is not limited to, ribonucleic acids (RNA), deoxyribonucleic acids (DNA), single-stranded nucleic acids, double-stranded nucleic acids, non-coding RNA, small interfering ribonucleic acids (siRNA), short-hairpin RNA (shRNA), and microRNAs (miRNA).

[0172] As used herein, “nucleobase” means a heterocyclic moiety capable of base pairing with a base of another nucleic acid.

[0173] As used herein, “nucleobase complementarity” refers to a nucleobase that is capable of base pairing with another nucleobase. For example, in DNA, adenine (A) is complementary to thymine (T). For example, in RNA, adenine (A) is complementary to uracil (U). In certain embodiments, complementary nucleobase refers to a nucleobase of an antisense compound that is capable of base pairing with a corresponding nucleobase of its target nucleic acid. For example, if a nucleobase at a certain position of an antisense compound is capable of hydrogen bonding with a nucleobase at a certain position of a target nucleic acid, then the position of hydrogen bonding between the oligonucleotide and the target nucleic acid is considered to be complementary at that nucleobase pair.

[0174] As used herein, “nucleobase sequence” means the order of nucleobases independent of any sugar, linkage, and/or nucleobase modification.

[0175] As used herein, “nucleoside” refers to a nucleobase linked to a sugar. The term “nucleoside” also includes a “modified nucleoside” which has independently, a modified sugar moiety and/or modified nucleobase.

[0176] As used herein, “nucleoside mimetic” includes those structures used to replace the sugar or the sugar and the base and not necessarily the linkage at one or more positions of an oligomeric compound such as for example nucleoside mimetics having morpholino, cyclohexenyl, cyclohexyl, tetrahydropyranyl, bicyclo, or tricyclo sugar mimetics, e.g., non-furanose sugar units. Nucleotide mimetic includes those structures used to replace the nucleoside and the linkage at one or more positions of an oligomeric compound such as for example peptide nucleic acids or morpholinos (morpholinos linked by a phosphorodiamidate or other non-phosphodiester linkage). Sugar surrogate overlaps with the slightly broader term nucleoside mimetic but is intended to indicate replacement of the sugar unit (furanose ring) only. The tetrahydropyranyl rings provided herein are illustrative of an example of a sugar surrogate wherein the furanose sugar group has been replaced with a tetrahydropyranyl ring system. “Mimetic” refers to groups that are substituted for a sugar, a nucleobase, and/or internucleoside linkage. Generally, a mimetic is used in place of the sugar or sugar-internucleoside linkage combination, and the nucleobase is maintained for hybridization to a selected target.

[0177] As used herein, “nucleotide” means a nucleoside having a phosphate group covalently linked to the sugar portion of the nucleoside.

[0178] As used herein, “oligomeric compound” or “oligomer” means a polymer of linked monomeric subunits which is capable of hybridizing to at least a region of a nucleic acid molecule.

[0179] As used herein, “oligonucleotide” means a polymer of one or more segments of linked nucleosides each of which can be modified or unmodified, independent one from another.

[0180] As used herein, “hotspot region” is a range of nucleobases on a target nucleic acid amenable to oligomeric compound-mediated modulation of the splicing of the target nucleic acid.

[0181] As used herein, “hybridization” means the pairing or annealing of complementary oligonucleotides and/or nucleic acids. While not limited to a particular mechanism, the most common mechanism of hybridization involves hydrogen bonding, which may be Watson-Crick, Hoogsteen or reversed Hoogsteen hydrogen bonding between complementary nucleobases.

[0182] As used herein, “increasing the amount of activity” refers to more transcriptional expression, more accurate splicing resulting in full length mature mRNA and/or protein expression, and/or more activity relative to the transcriptional expression or activity in an untreated or control sample.

### Antisense Therapeutics

[0183] Antisense therapeutics are a class of nucleic acid-based compounds that can be used to modulate a transcript, such as mRNA. In various embodiments, antisense therapeutics comprise one or more spacers and can be used to modulate a transcript that is transcribed from a gene, such as a UNC13A pre-mRNA.

[0184] Antisense therapeutics may be single- or double-stranded deoxyribonucleic acid (DNA)-based, ribonucleic acid (RNA)-based, or DNA/RNA chemical analogue compounds. In general, antisense therapeutics are designed to include a sequence that is complementary or nearly complementary to an mRNA or pre-mRNA sequence transcribed from a given gene in order to promote binding between the antisense therapeutic and the pre-mRNA or mRNA. In certain embodiments, antisense therapeutics act by binding to an mRNA or pre-mRNA, thereby inhibiting protein translation, altering pre-mRNA splicing into mature mRNA (e.g., by preventing appropriate proteins such as splicing activator proteins from binding), and/or causing destruction of mRNA. In certain embodiments, the antisense therapeutic sequence is complementary to a portion of a targeted gene's or mRNA's sense sequence. In certain embodiments, antisense therapeutics described herein are oligonucleotide-based compounds that include an oligonucleotide sequence complementary to a pre-mRNA sense, or a portion thereof, and one or more spacers. In certain embodiments, antisense therapeutics described herein can also be nucleotide chemical analog-based compounds.

[0185] In certain embodiments, an oligonucleotide, such as disclosed herein, may be an oligonucleotide sequence of 5 to 100 oligonucleotide units in length, for example, 10 to 60 oligonucleotide units in length, for example, 12 to 50 oligonucleotide units in length, 14 to 40 oligonucleotide units in length, 10 to 30 oligonucleotide units in length, for example, 14 to 30 oligonucleotide units in length, for example, 14 to 25 or 15 to 22 oligonucleotide units in length, or 18, 19, 20, 21, 22, 23, 24, 25, 26, or 27 oligonucleotide units in length. As used herein, an “oligonucleotide unit” refers to either a nucleoside (e.g., a nucleoside which includes a sugar and/or a nucleobase) or a nucleoside-replacement group (e.g., a spacer) of the oligonucleotide.

[0186] In particular embodiments, the oligonucleotides are 25 oligonucleotide units in length. In particular embodiments, the oligonucleotides are 23 oligonucleotide units in length. In particular embodiments, the oligonucleotides are 21 oligonucleotide units in length. In particular embodiments, the oligonucleotides are 19 oligonucleotide units in length. In various embodiments, the oligonucleotide is at least 18, at least 19, at least 20, at least 21, at least 22, at least 23, at least 24, at least 25, at least 26, or at least 27 oligonucleotide units in length. In various embodiments, the oligonucleotide is at least 18 oligonucleotide units in length. In various embodiments, the oligonucleotide is at least 19 oligonucleotide units in length. In various embodiments, the oligonucleotide is at least 20 oligonucleotide units in length. In various embodiments, the oligonucleotide is at least 21 oligonucleotide units in length. In various embodiments, the oligonucleotide is at least 22 oligonucleotide units in length. In various embodiments, the oligonucleotide is at least 23 oligonucleotide units in length. In various embodiments, the oligonucleotide is at least 24 oligonucleotide units in length. In various embodiments, the oligonucleotide is at least 25 oligonucleotide units in length. In various embodiments, the oligonucleotide is at least 26 oligonucleotide units in length. In various embodiments, the oligonucleotide is at least 27 oligonucleotide units in length.

[0187] In certain embodiments, AONs may include chemically modified nucleosides (for example, 2′-O-methylated nucleosides or 2′-O-(2-methoxyethyl) nucleosides) as well as modified internucleoside linkages (for example, phosphorothioate linkages). In certain embodiments, AONs described herein include oligonucleotide sequences that are complementary to RNA sequences, such as UNC13A mRNA sequences. In certain embodiments, AONs described herein can include chemically modified nucleosides and modified internucleoside linkages (for example, phosphorothioate linkages). In particular embodiments, AONs described herein include one or more spacers.

[0188] In various embodiments, the oligonucleotides comprise one or more spacers. In particular embodiments, the oligonucleotides comprise one spacer. In various embodiments, the oligonucleotides comprise two spacers. For example, the oligonucleotide includes 23 oligonucleotide units with 21 nucleobases and two nucleoside replacement groups (e.g., two spacers). Further embodiments of oligonucleotides with one spacer and oligonucleotides with two spacers are described herein. In various embodiments, the oligonucleotides comprise three spacers.

[0189] In some embodiments, an antisense oligonucleotide can be, but is not limited to, inhibitors of a gene transcript (for example, shRNAs, siRNAs, PNAs, LNAs, 2′-O-methyl (2′OMe) antisense oligonucleotide (AON), 2′-O-(2-methoxyethyl) (MOE) AON, or morpholino oligomers (e.g., phosphorodiamidate morpholino (PMO))), or compositions that include such compounds. In some embodiments an oligonucleotide is an antisense oligonucleotide (AON) comprising 2′OMe (e.g., a AON comprising one or more 2′OMe modified sugar), MOE (e.g., a AON comprising one or more MOE modified sugar), peptide nucleic acids (e.g., a AON comprising one or more N-(2-aminoethyl)-glycine units linked by amide bonds or carbonyl methylene linkage as repeating units in place of a sugar-phosphate backbone), locked nucleic acids (e.g., a AON comprising one or more locked ribose, and can be a mixture of 2′-deoxy nucleotides or 2′OMe nucleotides), c-ET (e.g., a AON comprising one or more cET sugar), constrained methoxyethyl (cMOE) (e.g., a AON comprising one or more cMOE sugar), morpholino oligomer (e.g., a AON comprising a backbone comprising one or more PMO), deoxy-2′-fluoro nucleoside (e.g., a AON comprising one or more 2′-fluoro-β-D-arabinonucleoside), tricyclo-DNAs (tcDNA) (e.g., a AON comprising one or more tcDNA modified sugar), 2′-0,4′-C-Ethylene-bridged nucleic acid (ENA) (e.g., a AON comprising one or more ENA modified sugar), or hexitol nucleic acids (HNA) (e.g., a AON comprising one or more HNA modified sugar). In some embodiments, a AON comprises one or more internucleoside linkage independently selected from a phosphorothioate linkage, phosphodiester linkage, phosphotriester linkage, methylphosphonate linkage, phosphoramidate linkage, a phosphoramidothioate linkage, a thiophosphorodiamidate linkage, phosphorodiamidate morpholino (PMO) (morpholino) linkage, PNA linkage, or any combination of phosphorothioate linkage, phosphodiester linkage, a phosphotriester linkage, methylphosphonate linkage, phosphoramidate linkage, a phosphoramidothioate linkage, thiophosphorodiamidate linkage, phosphorodiamidate morpholino (PMO) (morpholino) linkage, and PNA linkage. In some embodiments, a UNC13A AON comprises one or more phosphorothioate linkage, phosphodiester linkage, or a combination of phosphorothioate and phosphodiester linkages.

[0190] Peptide nucleic acids (PNAs) are short, artificially synthesized polymers with a structure that mimics DNA or RNA. PNAs include a backbone composed of repeating N-(2-aminoethyl)-glycine units linked by peptide bonds. In certain embodiments, PNAs described herein can be used as antisense therapeutics that bind to RNA sequences with high specificity and increase, restore, and/or stabilize levels (e.g., full length UNC13A mRNA or protein levels) and/or activity (e.g., biological activity, for example, UNC13A activity).

[0191] Locked nucleic acids (LNAs) are oligonucleotide sequences that include one or more modified RNA nucleotides in which the ribose moiety is modified with an extra bridge connecting the 2′ oxygen and 4′ carbon. LNAs are believed to have higher Tm's than analogous oligonucleotide sequences. In certain embodiments, LNAs described herein can be used as antisense therapeutics that bind to RNA sequences with high specificity. For example, LNAs can bind to UNC13A pre-mRNA and prevent mis-splicing of UNC13A pre-mRNA, and increase, restore, and/or stabilize UNC13A levels (e.g., UNC13A mRNA or protein levels) and/or activity (e.g., biological activity, for example, UNC13A activity).

[0192] Morpholino oligomers are oligonucleotide compounds that include DNA bases attached to a backbone of methylenemorpholine rings linked through phosphorodiamidate groups. In certain embodiments, morpholino oligomers of the present invention can be designed to bind to specific pre-mRNA sequence of interest. For example, morpholino oligomers bind to UNC13A pre-mRNA thereby preventing mis-splicing of the pre-mRNA, and increase, restore, and/or stabilize UNC13A levels (e.g., UNC13A mRNA or protein levels) and/or activity (e.g., biological activity, for example, UNC13A activity). In certain embodiments, UNC13A morpholino oligomers described herein can be used as antisense therapeutics that bind to UNC13A pre-mRNA sequences with high specificity and prevent mis-splicing of UNC13A pre-mRNA, and increase, restore, and/or stabilize UNC13A levels (e.g., UNC13A mRNA or protein levels) and/or activity (e.g., biological activity, for example, UNC13A activity). In certain embodiments, UNC13A morpholino oligomers described herein can also be used to bind UNC13A pre-mRNA sequences, altering UNC13A pre-mRNA splicing and UNC13A gene expression, and increase, restore, and/or stabilize UNC13A levels (e.g., UNC13A mRNA or protein levels) and/or activity (e.g., biological activity, for example, UNC13A activity).

### UNC13A Oligonucleotides Complementary to UNC13A Transcript

[0193] In some embodiments, a UNC13A AON includes a sequence that is at least % complementary to a sequence that shares at least 90% (e.g., 90%, 91%, 92%, 93%, 94%, 95%, 96%, 97%, 98%, 99%, or 100%) identity to a region of a UNC13A transcript (e.g., SEQ ID NO: 5057-5065 or SEQ ID NOs: 5206-5208). In some embodiments, a UNC13A AON includes a sequence that is between 90-95% complementary to a sequence that shares at least 90% (e.g., 90%, 91%, 92%, 93%, 94%, 95%, 96%, 97%, 98%, 99%, or 100%) identity to a region of a UNC13A transcript (e.g., SEQ ID NO: 5057-5065 or SEQ ID NOs: 5206-5208). In particular embodiments, a UNC13A AON includes a sequence that is at least 85% complementary to a sequence that shares at least 90% (e.g., 90%, 91%, 92%, 93%, 94%, 95%, 96%, 97%, 98%, 99%, or 100%) identity to a region of a UNC13A transcript (e.g., SEQ ID NO: 5057-5065 or SEQ ID NOs: 5206-5208). In particular embodiments, a UNC13A AON includes a sequence that is between 84% to 88% complementary to a sequence that shares at least 90% (e.g., 90%, 91%, 92%, 93%, 94%, 95%, 96%, 97%, 98%, 99%, or 100%) identity to a region of a UNC13A transcript (e.g., SEQ ID NO: 5057-5065 or SEQ ID NOs: 5206-5208). In particular embodiments, a UNC13A AON includes a sequence that is between 89% to 92% complementary to a sequence that shares at least 90% (e.g., 90%, 91%, 92%, 93%, 94%, 95%, 96%, 97%, 98%, 99%, or 100%) identity to a region of a mis-spliced UNC13A transcript (e.g., SEQ ID NO: 5057-5065). In particular embodiments, a UNC13A AON includes a sequence that is between 94% to 96% complementary to a sequence that shares at least 90% (e.g., 90%, 91%, 92%, 93%, 94%, 95%, 96%, 97%, 98%, 99%, or 100%) identity to a region of a UNC13A transcript (e.g., SEQ ID NO: 5057-5065 or SEQ ID NOs: 5206-5208).

[0194] In various embodiments, a UNC13A AON comprises a sequence that shares at least 85% identity with an equal length portion of any one of SEQ ID NOs: 1-1264, SEQ ID NOs: 2529-3792, SEQ ID NOs: 5066-5166, SEQ ID NOs: 5168-5202, SEQ ID NOs: 5209-5221, or SEQ ID NOs: 5235-5292. In various embodiments, a UNC13A AON comprises a sequence that shares at least 90% identity with an equal length portion of any one of SEQ ID NOs: 1-1264, SEQ ID NOs: 2529-3792, SEQ ID NOs: 5066-5166, SEQ ID NOs: 5168-5202, SEQ ID NOs: 5209-5221, or SEQ ID NOs: 5235-5292.

[0195] In some embodiments, the UNC13A AON comprises a spacer and has a segment having at most 7 linked nucleosides. In some embodiments, the UNC13A AON comprises a spacer and has a segment having at most 6, 5, 4, 3, or 2 linked nucleosides.

[0196] UNC13A AON binding specificity can be assessed via measurement of parameters such as dissociation constant, melting temperature, or other criteria such as changes in protein or RNA expression levels or other assays that measure UNC13A activity or expression.

[0197] In some embodiments, a UNC13A AON can include a non-duplexed oligonucleotide. In some embodiments, a UNC13A AON can include a duplex of two oligonucleotides where the first oligonucleotide includes a nucleobase sequence that is completely or almost completely complementary to a UNC13A pre-mRNA sequence and the second oligonucleotide includes a nucleobase sequence that is complementary to the nucleobase sequence of the first oligonucleotide.

[0198] In some embodiments, a UNC13A AON can target UNC13A pre-mRNAs produced from UNC13A genes of one or more species. For example, a UNC13A AON can target a UNC13A pre-mRNA of a mammalian UNC13A gene, for example, a human (i.e., Homo sapiens) UNC13A gene. In particular embodiments, the UNC13A AON targets a human UNC13A pre-mRNA. In some embodiments, the UNC13A AON includes a nucleobase sequence that is complementary to a nucleobase sequence of a UNC13A gene or a UNC13A pre-mRNA or a portion thereof.

[0199] UNC13A AONs described herein include antisense oligonucleotides comprising the oligonucleotide sequences listed in Table 1 below:

TABLE 1
Example UNC13A AON Sequences.

| SEQ | | SEQ | |
|---|---|---|---|
| ID | AON Sequence* | ID | Target Sequence |
| NO: | (5′ → 3′) | NO: | (5′ → 3′) |
| 1 | GGAGGGGCCGAGCAATGACCCTCAC | 1265 | GTGAGGGTCATTGCTCGGCCCCTCC |
| 2 | GGGAGGGGCCGAGCAATGACCCTCA | 1266 | TGAGGGTCATTGCTCGGCCCCTCCC |
| 3 | TGGGAGGGGCCGAGCAATGACCCTC | 1267 | GAGGGTCATTGCTCGGCCCCTCCCA |
| 4 | ATGGGAGGGGCCGAGCAATGACCCT | 1268 | AGGGTCATTGCTCGGCCCCTCCCAT |
| 5 | CATGGGAGGGGCCGAGCAATGACCC | 1269 | GGGTCATTGCTCGGCCCCTCCCATG |
| 6 | GCATGGGAGGGGCCGAGCAATGACC | 1270 | GGTCATTGCTCGGCCCCTCCCATGC |
| 7 | GGCATGGGAGGGGCCGAGCAATGAC | 1271 | GTCATTGCTCGGCCCCTCCCATGCC |
| 8 | TGGCATGGGAGGGGCCGAGCAATGA | 1272 | TCATTGCTCGGCCCCTCCCATGCCA |
| 9 | GTGGCATGGGAGGGGCCGAGCAATG | 1273 | CATTGCTCGGCCCCTCCCATGCCAC |
| 10 | AGTGGCATGGGAGGGGCCGAGCAAT | 1274 | ATTGCTCGGCCCCTCCCATGCCACT |
| 11 | AAGTGGCATGGGAGGGGCCGAGCAA | 1275 | TTGCTCGGCCCCTCCCATGCCACTT |
| 12 | GAAGTGGCATGGGAGGGGCCGAGCA | 1276 | TGCTCGGCCCCTCCCATGCCACTTC |
| 13 | GGAAGTGGCATGGGAGGGGCCGAGC | 1277 | GCTCGGCCCCTCCCATGCCACTTCC |
| 14 | TGGAAGTGGCATGGGAGGGGCCGAG | 1278 | CTCGGCCCCTCCCATGCCACTTCCA |
| 15 | GTGGAAGTGGCATGGGAGGGGCCGA | 1279 | TCGGCCCCTCCCATGCCACTTCCAC |
| 16 | AGTGGAAGTGGCATGGGAGGGGCCG | 1280 | CGGCCCCTCCCATGCCACTTCCACT |
| 17 | GAGTGGAAGTGGCATGGGAGGGGCC | 1281 | GGCCCCTCCCATGCCACTTCCACTC |
| 18 | TGAGTGGAAGTGGCATGGGAGGGGC | 1282 | GCCCCTCCCATGCCACTTCCACTCA |
| 19 | GTGAGTGGAAGTGGCATGGGAGGGG | 1283 | CCCCTCCCATGCCACTTCCACTCAC |
| 20 | GGTGAGTGGAAGTGGCATGGGAGGG | 1284 | CCCTCCCATGCCACTTCCACTCACC |
| 21 | TGGTGAGTGGAAGTGGCATGGGAGG | 1285 | CCTCCCATGCCACTTCCACTCACCA |
| 22 | ATGGTGAGTGGAAGTGGCATGGGAG | 1286 | CTCCCATGCCACTTCCACTCACCAT |
| 23 | AATGGTGAGTGGAAGTGGCATGGGA | 1287 | TCCCATGCCACTTCCACTCACCATT |
| 24 | GAATGGTGAGTGGAAGTGGCATGGG | 1288 | CCCATGCCACTTCCACTCACCATTC |
| 25 | GGAATGGTGAGTGGAAGTGGCATGG | 1289 | CCATGCCACTTCCACTCACCATTCC |
| 26 | AGGAATGGTGAGTGGAAGTGGCATG | 1290 | CATGCCACTTCCACTCACCATTCCT |
| 27 | CAGGAATGGTGAGTGGAAGTGGCAT | 1291 | ATGCCACTTCCACTCACCATTCCTG |
| 28 | GCAGGAATGGTGAGTGGAAGTGGCA | 1292 | TGCCACTTCCACTCACCATTCCTGC |
| 29 | GGCAGGAATGGTGAGTGGAAGTGGC | 1293 | GCCACTTCCACTCACCATTCCTGCC |
| 30 | AGGCAGGAATGGTGAGTGGAAGTGG | 1294 | CCACTTCCACTCACCATTCCTGCCT |
| 31 | CAGGCAGGAATGGTGAGTGGAAGTG | 1295 | CACTTCCACTCACCATTCCTGCCTG |
| 32 | GCAGGCAGGAATGGTGAGTGGAAGT | 1296 | ACTTCCACTCACCATTCCTGCCTGC |
| 33 | GGCAGGCAGGAATGGTGAGTGGAAG | 1297 | CTTCCACTCACCATTCCTGCCTGCC |
| 34 | GGGCAGGCAGGAATGGTGAGTGGAA | 1298 | TTCCACTCACCATTCCTGCCTGCCC |
| 35 | TGGGCAGGCAGGAATGGTGAGTGGA | 1299 | TCCACTCACCATTCCTGCCTGCCCA |
| 36 | CTGGGCAGGCAGGAATGGTGAGTGG | 1300 | CCACTCACCATTCCTGCCTGCCCAG |
| 37 | GCTGGGCAGGCAGGAATGGTGAGTG | 1301 | CACTCACCATTCCTGCCTGCCCAGC |
| 38 | AGCTGGGCAGGCAGGAATGGTGAGT | 1302 | ACTCACCATTCCTGCCTGCCCAGCT |
| 39 | GAGCTGGGCAGGCAGGAATGGTGAG | 1303 | CTCACCATTCCTGCCTGCCCAGCTC |
| 40 | AGAGCTGGGCAGGCAGGAATGGTGA | 1304 | TCACCATTCCTGCCTGCCCAGCTCT |
| 41 | AAGAGCTGGGCAGGCAGGAATGGTG | 1305 | CACCATTCCTGCCTGCCCAGCTCTT |
| 42 | GAAGAGCTGGGCAGGCAGGAATGGT | 1306 | ACCATTCCTGCCTGCCCAGCTCTTC |
| 43 | GGAAGAGCTGGGCAGGCAGGAATGG | 1307 | CCATTCCTGCCTGCCCAGCTCTTCC |
| 44 | AGGAAGAGCTGGGCAGGCAGGAATG | 1308 | CATTCCTGCCTGCCCAGCTCTTCCT |
| 45 | GAGGAAGAGCTGGGCAGGCAGGAAT | 1309 | ATTCCTGCCTGCCCAGCTCTTCCTC |
| 46 | AGAGGAAGAGCTGGGCAGGCAGGAA | 1310 | TTCCTGCCTGCCCAGCTCTTCCTCT |
| 47 | AAGAGGAAGAGCTGGGCAGGCAGGA | 1311 | TCCTGCCTGCCCAGCTCTTCCTCTT |
| 48 | AAAGAGGAAGAGCTGGGCAGGCAGG | 1312 | CCTGCCTGCCCAGCTCTTCCTCTTT |
| 49 | GAAAGAGGAAGAGCTGGGCAGGCAG | 1313 | CTGCCTGCCCAGCTCTTCCTCTTTC |
| 50 | AGAAAGAGGAAGAGCTGGGCAGGCA | 1314 | TGCCTGCCCAGCTCTTCCTCTTTCT |
| 51 | CAGAAAGAGGAAGAGCTGGGCAGGC | 1315 | GCCTGCCCAGCTCTTCCTCTTTCTG |
| 52 | CCAGAAAGAGGAAGAGCTGGGCAGG | 1316 | CCTGCCCAGCTCTTCCTCTTTCTGG |
| 53 | GCCAGAAAGAGGAAGAGCTGGGCAG | 1317 | CTGCCCAGCTCTTCCTCTTTCTGGC |
| 54 | GGCCAGAAAGAGGAAGAGCTGGGCA | 1318 | TGCCCAGCTCTTCCTCTTTCTGGCC |
| 55 | TGGCCAGAAAGAGGAAGAGCTGGGC | 1319 | GCCCAGCTCTTCCTCTTTCTGGCCA |
| 56 | GTGGCCAGAAAGAGGAAGAGCTGGG | 1320 | CCCAGCTCTTCCTCTTTCTGGCCAC |
| 57 | TGTGGCCAGAAAGAGGAAGAGCTGG | 1321 | CCAGCTCTTCCTCTTTCTGGCCACA |
| 58 | GTGTGGCCAGAAAGAGGAAGAGCTG | 1322 | CAGCTCTTCCTCTTTCTGGCCACAC |
| 59 | GGTGTGGCCAGAAAGAGGAAGAGCT | 1323 | AGCTCTTCCTCTTTCTGGCCACACC |
| 60 | TGGTGTGGCCAGAAAGAGGAAGAGC | 1324 | GCTCTTCCTCTTTCTGGCCACACCA |
| 61 | ATGGTGTGGCCAGAAAGAGGAAGAG | 1325 | CTCTTCCTCTTTCTGGCCACACCAT |
| 62 | GATGGTGTGGCCAGAAAGAGGAAGA | 1326 | TCTTCCTCTTTCTGGCCACACCATC |
| 63 | GGATGGTGTGGCCAGAAAGAGGAAG | 1327 | CTTCCTCTTTCTGGCCACACCATCC |
| 64 | TGGATGGTGTGGCCAGAAAGAGGAA | 1328 | TTCCTCTTTCTGGCCACACCATCCA |
| 65 | GTGGATGGTGTGGCCAGAAAGAGGA | 1329 | TCCTCTTTCTGGCCACACCATCCAC |
| 66 | TGTGGATGGTGTGGCCAGAAAGAGG | 1330 | CCTCTTTCTGGCCACACCATCCACA |
| 67 | GTGTGGATGGTGTGGCCAGAAAGAG | 1331 | CTCTTTCTGGCCACACCATCCACAC |
| 68 | AGTGTGGATGGTGTGGCCAGAAAGA | 1332 | TCTTTCTGGCCACACCATCCACACT |
| 69 | GAGTGTGGATGGTGTGGCCAGAAAG | 1333 | CTTTCTGGCCACACCATCCACACTC |
| 70 | AGAGTGTGGATGGTGTGGCCAGAAA | 1334 | TTTCTGGCCACACCATCCACACTCT |
| 71 | GAGAGTGTGGATGGTGTGGCCAGAA | 1335 | TTCTGGCCACACCATCCACACTCTC |
| 72 | GGAGAGTGTGGATGGTGTGGCCAGA | 1336 | TCTGGCCACACCATCCACACTCTCC |
| 73 | AGGAGAGTGTGGATGGTGTGGCCAG | 1337 | CTGGCCACACCATCCACACTCTCCT |
| 74 | CAGGAGAGTGTGGATGGTGTGGCCA | 1338 | TGGCCACACCATCCACACTCTCCTG |
| 75 | CCAGGAGAGTGTGGATGGTGTGGCC | 1339 | GGCCACACCATCCACACTCTCCTGG |
| 76 | GCCAGGAGAGTGTGGATGGTGTGGC | 1340 | GCCACACCATCCACACTCTCCTGGC |
| 77 | GGCCAGGAGAGTGTGGATGGTGTGG | 1341 | CCACACCATCCACACTCTCCTGGCC |
| 78 | GGGCCAGGAGAGTGTGGATGGTGTG | 1342 | CACACCATCCACACTCTCCTGGCCC |
| 79 | AGGGCCAGGAGAGTGTGGATGGTGT | 1343 | ACACCATCCACACTCTCCTGGCCCT |
| 80 | GAGGGCCAGGAGAGTGTGGATGGTG | 1344 | CACCATCCACACTCTCCTGGCCCTC |
| 81 | AGAGGGCCAGGAGAGTGTGGATGGT | 1345 | ACCATCCACACTCTCCTGGCCCTCT |
| 82 | CAGAGGGCCAGGAGAGTGTGGATGG | 1346 | CCATCCACACTCTCCTGGCCCTCTG |
| 83 | TCAGAGGGCCAGGAGAGTGTGGATG | 1347 | CATCCACACTCTCCTGGCCCTCTGA |
| 84 | CTCAGAGGGCCAGGAGAGTGTGGAT | 1348 | ATCCACACTCTCCTGGCCCTCTGAG |
| 85 | TCTCAGAGGGCCAGGAGAGTGTGGA | 1349 | TCCACACTCTCCTGGCCCTCTGAGA |
| 86 | GTCTCAGAGGGCCAGGAGAGTGTGG | 1350 | CCACACTCTCCTGGCCCTCTGAGAC |
| 87 | AGTCTCAGAGGGCCAGGAGAGTGTG | 1351 | CACACTCTCCTGGCCCTCTGAGACT |
| 88 | CAGTCTCAGAGGGCCAGGAGAGTGT | 1352 | ACACTCTCCTGGCCCTCTGAGACTG |
| 89 | GCAGTCTCAGAGGGCCAGGAGAGTG | 1353 | CACTCTCCTGGCCCTCTGAGACTGC |
| 90 | GGCAGTCTCAGAGGGCCAGGAGAGT | 1354 | ACTCTCCTGGCCCTCTGAGACTGCC |
| 91 | GGGCAGTCTCAGAGGGCCAGGAGAG | 1355 | CTCTCCTGGCCCTCTGAGACTGCCC |
| 92 | CGGGCAGTCTCAGAGGGCCAGGAGA | 1356 | TCTCCTGGCCCTCTGAGACTGCCCG |
| 93 | GCGGGCAGTCTCAGAGGGCCAGGAG | 1357 | CTCCTGGCCCTCTGAGACTGCCCGC |
| 94 | GGCGGGCAGTCTCAGAGGGCCAGGA | 1358 | TCCTGGCCCTCTGAGACTGCCCGCC |
| 95 | TGGCGGGCAGTCTCAGAGGGCCAGG | 1359 | CCTGGCCCTCTGAGACTGCCCGCCA |
| 96 | ATGGCGGGCAGTCTCAGAGGGCCAG | 1360 | CTGGCCCTCTGAGACTGCCCGCCAT |
| 97 | CATGGCGGGCAGTCTCAGAGGGCCA | 1361 | TGGCCCTCTGAGACTGCCCGCCATG |
| 98 | GCATGGCGGGCAGTCTCAGAGGGCC | 1362 | GGCCCTCTGAGACTGCCCGCCATGC |
| 99 | GGCATGGCGGGCAGTCTCAGAGGGC | 1363 | GCCCTCTGAGACTGCCCGCCATGCC |
| 100 | TGGCATGGCGGGCAGTCTCAGAGGG | 1364 | CCCTCTGAGACTGCCCGCCATGCCA |
| 101 | ATGGCATGGCGGGCAGTCTCAGAGG | 1365 | CCTCTGAGACTGCCCGCCATGCCAT |
| 102 | AATGGCATGGCGGGCAGTCTCAGAG | 1366 | CTCTGAGACTGCCCGCCATGCCATT |
| 103 | GAATGGCATGGCGGGCAGTCTCAGA | 1367 | TCTGAGACTGCCCGCCATGCCATTC |
| 104 | GGAATGGCATGGCGGGCAGTCTCAG | 1368 | CTGAGACTGCCCGCCATGCCATTCC |
| 105 | GGGAATGGCATGGCGGGCAGTCTCA | 1369 | TGAGACTGCCCGCCATGCCATTCCC |
| 106 | AGGGAATGGCATGGCGGGCAGTCTC | 1370 | GAGACTGCCCGCCATGCCATTCCCT |
| 107 | AAGGGAATGGCATGGGGGCAGTCT | 1371 | AGACTGCCCGCCATGCCATTCCCTT |
| 108 | AAAGGGAATGGCATGGCGGGCAGTC | 1372 | GACTGCCCGCCATGCCATTCCCTTT |
| 109 | TAAAGGGAATGGCATGGCGGGCAGT | 1373 | ACTGCCCGCCATGCCATTCCCTTTA |
| 110 | GTAAAGGGAATGGCATGGCGGGCAG | 1374 | CTGCCCGCCATGCCATTCCCTTTAC |
| 111 | GGTAAAGGGAATGGCATGGCGGGCA | 1375 | TGCCCGCCATGCCATTCCCTTTACC |
| 112 | AGGTAAAGGGAATGGCATGGCGGGC | 1376 | GCCCGCCATGCCATTCCCTTTACCT |
| 113 | CAGGTAAAGGGAATGGCATGGCGGG | 1377 | CCCGCCATGCCATTCCCTTTACCTG |
| 114 | CCAGGTAAAGGGAATGGCATGGCGG | 1378 | CCGCCATGCCATTCCCTTTACCTGG |
| 115 | TCCAGGTAAAGGGAATGGCATGGCG | 1379 | CGCCATGCCATTCCCTTTACCTGGA |
| 116 | TTCCAGGTAAAGGGAATGGCATGGC | 1380 | GCCATGCCATTCCCTTTACCTGGAA |
| 117 | TTTCCAGGTAAAGGGAATGGCATGG | 1381 | CCATGCCATTCCCTTTACCTGGAAA |
| 118 | TTTTCCAGGTAAAGGGAATGGCATG | 1382 | CATGCCATTCCCTTTACCTGGAAAA |
| 119 | GTTTTCCAGGTAAAGGGAATGGCAT | 1383 | ATGCCATTCCCTTTACCTGGAAAAC |
| 120 | AGTTTTCCAGGTAAAGGGAATGGCA | 1384 | TGCCATTCCCTTTACCTGGAAAACT |
| 121 | GAGTTTTCCAGGTAAAGGGAATGGC | 1385 | GCCATTCCCTTTACCTGGAAAACTC |
| 122 | GGAGTTTTCCAGGTAAAGGGAATGG | 1386 | CCATTCCCTTTACCTGGAAAACTCC |
| 123 | AGGAGTTTTCCAGGTAAAGGGAATG | 1387 | CATTCCCTTTACCTGGAAAACTCCT |
| 124 | GAGGAGTTTTCCAGGTAAAGGGAAT | 1388 | ATTCCCTTTACCTGGAAAACTCCTC |
| 125 | GGAGGAGTTTTCCAGGTAAAGGGAA | 1389 | TTCCCTTTACCTGGAAAACTCCTCC |
| 126 | GGGAGGAGTTTTCCAGGTAAAGGGA | 1390 | TCCCTTTACCTGGAAAACTCCTCCC |
| 127 | AGGGAGGAGTTTTCCAGGTAAAGGG | 1391 | CCCTTTACCTGGAAAACTCCTCCCT |
| 128 | TAGGGAGGAGTTTTCCAGGTAAAGG | 1392 | CCTTTACCTGGAAAACTCCTCCCTA |
| 129 | ATAGGGAGGAGTTTTCCAGGTAAAG | 1393 | CTTTACCTGGAAAACTCCTCCCTAT |
| 130 | GATAGGGAGGAGTTTTCCAGGTAAA | 1394 | TTTACCTGGAAAACTCCTCCCTATC |
| 131 | GGATAGGGAGGAGTTTTCCAGGTAA | 1395 | TTACCTGGAAAACTCCTCCCTATCC |
| 132 | TGGATAGGGAGGAGTTTTCCAGGTA | 1396 | TACCTGGAAAACTCCTCCCTATCCA |
| 133 | ATGGATAGGGAGGAGTTTTCCAGGT | 1397 | ACCTGGAAAACTCCTCCCTATCCAT |
| 134 | GATGGATAGGGAGGAGTTTTCCAGG | 1398 | CCTGGAAAACTCCTCCCTATCCATC |
| 135 | TGATGGATAGGGAGGAGTTTTCCAG | 1399 | CTGGAAAACTCCTCCCTATCCATCA |
| 136 | TTGATGGATAGGGAGGAGTTTTCCA | 1400 | TGGAAAACTCCTCCCTATCCATCAA |
| 137 | TTTGATGGATAGGGAGGAGTTTTCC | 1401 | GGAAAACTCCTCCCTATCCATCAAA |
| 138 | CTTTGATGGATAGGGAGGAGTTTTC | 1402 | GAAAACTCCTCCCTATCCATCAAAG |
| 139 | ACTTTGATGGATAGGGAGGAGTTTT | 1403 | AAAACTCCTCCCTATCCATCAAAGT |
| 140 | GACTTTGATGGATAGGGAGGAGTTT | 1404 | AAACTCCTCCCTATCCATCAAAGTC |
| 141 | GGACTTTGATGGATAGGGAGGAGTT | 1405 | AACTCCTCCCTATCCATCAAAGTCC |
| 142 | TGGACTTTGATGGATAGGGAGGAGT | 1406 | ACTCCTCCCTATCCATCAAAGTCCA |
| 143 | CTGGACTTTGATGGATAGGGAGGAG | 1407 | CTCCTCCCTATCCATCAAAGTCCAG |
| 144 | TCTGGACTTTGATGGATAGGGAGGA | 1408 | TCCTCCCTATCCATCAAAGTCCAGA |
| 145 | ATCTGGACTTTGATGGATAGGGAGG | 1409 | CCTCCCTATCCATCAAAGTCCAGAT |
| 146 | AATCTGGACTTTGATGGATAGGGAG | 1410 | CTCCCTATCCATCAAAGTCCAGATT |
| 147 | GAATCTGGACTTTGATGGATAGGGA | 1411 | TCCCTATCCATCAAAGTCCAGATTC |
| 148 | TGAATCTGGACTTTGATGGATAGGG | 1412 | CCCTATCCATCAAAGTCCAGATTCA |
| 149 | CTGAATCTGGACTTTGATGGATAGG | 1413 | CCTATCCATCAAAGTCCAGATTCAG |
| 150 | CCTGAATCTGGACTTTGATGGATAG | 1414 | CTATCCATCAAAGTCCAGATTCAGG |
| 151 | CCCTGAATCTGGACTTTGATGGATA | 1415 | TATCCATCAAAGTCCAGATTCAGGG |
| 152 | ACCCTGAATCTGGACTTTGATGGAT | 1416 | ATCCATCAAAGTCCAGATTCAGGGT |
| 153 | GACCCTGAATCTGGACTTTGATGGA | 1417 | TCCATCAAAGTCCAGATTCAGGGTC |
| 154 | TGACCCTGAATCTGGACTTTGATGG | 1418 | CCATCAAAGTCCAGATTCAGGGTCA |
| 155 | GTGACCCTGAATCTGGACTTTGATG | 1419 | CATCAAAGTCCAGATTCAGGGTCAC |
| 156 | GGTGACCCTGAATCTGGACTTTGAT | 1420 | ATCAAAGTCCAGATTCAGGGTCACC |
| 157 | AGGTGACCCTGAATCTGGACTTTGA | 1421 | TCAAAGTCCAGATTCAGGGTCACCT |
| 158 | GAGGTGACCCTGAATCTGGACTTTG | 1422 | CAAAGTCCAGATTCAGGGTCACCTC |
| 159 | GGAGGTGACCCTGAATCTGGACTTT | 1423 | AAAGTCCAGATTCAGGGTCACCTCC |
| 160 | AGGAGGTGACCCTGAATCTGGACTT | 1424 | AAGTCCAGATTCAGGGTCACCTCCT |
| 161 | GAGGAGGTGACCCTGAATCTGGACT | 1425 | AGTCCAGATTCAGGGTCACCTCCTC |
| 162 | AGAGGAGGTGACCCTGAATCTGGAC | 1426 | GTCCAGATTCAGGGTCACCTCCTCT |
| 163 | CAGAGGAGGTGACCCTGAATCTGGA | 1427 | TCCAGATTCAGGGTCACCTCCTCTG |
| 164 | CCAGAGGAGGTGACCCTGAATCTGG | 1428 | CCAGATTCAGGGTCACCTCCTCTGG |
| 165 | CCCAGAGGAGGTGACCCTGAATCTG | 1429 | CAGATTCAGGGTCACCTCCTCTGGG |
| 166 | TCCCAGAGGAGGTGACCCTGAATCT | 1430 | AGATTCAGGGTCACCTCCTCTGGGA |
| 167 | TTCCCAGAGGAGGTGACCCTGAATC | 1431 | GATTCAGGGTCACCTCCTCTGGGAA |
| 168 | CTTCCCAGAGGAGGTGACCCTGAAT | 1432 | ATTCAGGGTCACCTCCTCTGGGAAG |
| 169 | GCTTCCCAGAGGAGGTGACCCTGAA | 1433 | TTCAGGGTCACCTCCTCTGGGAAGC |
| 170 | GGCTTCCCAGAGGAGGTGACCCTGA | 1434 | TCAGGGTCACCTCCTCTGGGAAGCC |
| 171 | GGGCTTCCCAGAGGAGGTGACCCTG | 1435 | CAGGGTCACCTCCTCTGGGAAGCCC |
| 172 | TGGGCTTCCCAGAGGAGGTGACCCT | 1436 | AGGGTCACCTCCTCTGGGAAGCCCA |
| 173 | GTGGGCTTCCCAGAGGAGGTGACCC | 1437 | GGGTCACCTCCTCTGGGAAGCCCAC |
| 174 | GGTGGGCTTCCCAGAGGAGGTGACC | 1438 | GGTCACCTCCTCTGGGAAGCCCACC |
| 175 | AGGTGGGCTTCCCAGAGGAGGTGAC | 1439 | GTCACCTCCTCTGGGAAGCCCACCT |
| 176 | AAGGTGGGCTTCCCAGAGGAGGTGA | 1440 | TCACCTCCTCTGGGAAGCCCACCTT |
| 177 | CAAGGTGGGCTTCCCAGAGGAGGTG | 1441 | CACCTCCTCTGGGAAGCCCACCTTG |
| 178 | CCAAGGTGGGCTTCCCAGAGGAGGT | 1442 | ACCTCCTCTGGGAAGCCCACCTTGG |
| 179 | GCCAAGGTGGGCTTCCCAGAGGAGG | 1443 | CCTCCTCTGGGAAGCCCACCTTGGC |
| 180 | GGCCAAGGTGGGCTTCCCAGAGGAG | 1444 | CTCCTCTGGGAAGCCCACCTTGGCC |
| 181 | AGGCCAAGGTGGGCTTCCCAGAGGA | 1445 | TCCTCTGGGAAGCCCACCTTGGCCT |
| 182 | GAGGCCAAGGTGGGCTTCCCAGAGG | 1446 | CCTCTGGGAAGCCCACCTTGGCCTC |
| 183 | GGAGGCCAAGGTGGGCTTCCCAGAG | 1447 | CTCTGGGAAGCCCACCTTGGCCTCC |
| 184 | TGGAGGCCAAGGTGGGCTTCCCAGA | 1448 | TCTGGGAAGCCCACCTTGGCCTCCA |
| 185 | CTGGAGGCCAAGGTGGGCTTCCCAG | 1449 | CTGGGAAGCCCACCTTGGCCTCCAG |
| 186 | CCTGGAGGCCAAGGTGGGCTTCCCA | 1450 | TGGGAAGCCCACCTTGGCCTCCAGG |
| 187 | ACCTGGAGGCCAAGGTGGGCTTCCC | 1451 | GGGAAGCCCACCTTGGCCTCCAGGT |
| 188 | AACCTGGAGGCCAAGGTGGGCTTCC | 1452 | GGAAGCCCACCTTGGCCTCCAGGTT |
| 189 | CAACCTGGAGGCCAAGGTGGGCTTC | 1453 | GAAGCCCACCTTGGCCTCCAGGTTG |
| 190 | TCAACCTGGAGGCCAAGGTGGGCTT | 1454 | AAGCCCACCTTGGCCTCCAGGTTGA |
| 191 | GTCAACCTGGAGGCCAAGGTGGGCT | 1455 | AGCCCACCTTGGCCTCCAGGTTGAC |
| 192 | AGTCAACCTGGAGGCCAAGGTGGGC | 1456 | GCCCACCTTGGCCTCCAGGTTGACT |
| 193 | GAGTCAACCTGGAGGCCAAGGTGGG | 1457 | CCCACCTTGGCCTCCAGGTTGACTC |
| 194 | AGAGTCAACCTGGAGGCCAAGGTGG | 1458 | CCACCTTGGCCTCCAGGTTGACTCT |
| 195 | GAGAGTCAACCTGGAGGCCAAGGTG | 1459 | CACCTTGGCCTCCAGGTTGACTCTC |
| 196 | TGAGAGTCAACCTGGAGGCCAAGGT | 1460 | ACCTTGGCCTCCAGGTTGACTCTCA |
| 197 | GTGAGAGTCAACCTGGAGGCCAAGG | 1461 | CCTTGGCCTCCAGGTTGACTCTCAC |
| 198 | AGTGAGAGTCAACCTGGAGGCCAAG | 1462 | CTTGGCCTCCAGGTTGACTCTCACT |
| 199 | TAGTGAGAGTCAACCTGGAGGCCAA | 1463 | TTGGCCTCCAGGTTGACTCTCACTA |
| 200 | GTAGTGAGAGTCAACCTGGAGGCCA | 1464 | TGGCCTCCAGGTTGACTCTCACTAC |
| 201 | AGTAGTGAGAGTCAACCTGGAGGCC | 1465 | GGCCTCCAGGTTGACTCTCACTACT |
| 202 | GAGTAGTGAGAGTCAACCTGGAGGC | 1466 | GCCTCCAGGTTGACTCTCACTACTC |
| 203 | TGAGTAGTGAGAGTCAACCTGGAGG | 1467 | CCTCCAGGTTGACTCTCACTACTCA |
| 204 | ATGAGTAGTGAGAGTCAACCTGGAG | 1468 | CTCCAGGTTGACTCTCACTACTCAT |
| 205 | GATGAGTAGTGAGAGTCAACCTGGA | 1469 | TCCAGGTTGACTCTCACTACTCATC |
| 206 | TGATGAGTAGTGAGAGTCAACCTGG | 1470 | CCAGGTTGACTCTCACTACTCATCA |
| 207 | ATGATGAGTAGTGAGAGTCAACCTG | 1471 | CAGGTTGACTCTCACTACTCATCAT |
| 208 | GATGATGAGTAGTGAGAGTCAACCT | 1472 | AGGTTGACTCTCACTACTCATCATC |
| 209 | TGATGATGAGTAGTGAGAGTCAACC | 1473 | GGTTGACTCTCACTACTCATCATCA |
| 210 | CTGATGATGAGTAGTGAGAGTCAAC | 1474 | GTTGACTCTCACTACTCATCATCAG |
| 211 | CCTGATGATGAGTAGTGAGAGTCAA | 1475 | TTGACTCTCACTACTCATCATCAGG |
| 212 | ACCTGATGATGAGTAGTGAGAGTCA | 1476 | TGACTCTCACTACTCATCATCAGGT |
| 213 | AACCTGATGATGAGTAGTGAGAGTC | 1477 | GACTCTCACTACTCATCATCAGGTT |
| 214 | GAACCTGATGATGAGTAGTGAGAGT | 1478 | ACTCTCACTACTCATCATCAGGTTC |
| 215 | AGAACCTGATGATGAGTAGTGAGAG | 1479 | CTCTCACTACTCATCATCAGGTTCT |
| 216 | AAGAACCTGATGATGAGTAGTGAGA | 1480 | TCTCACTACTCATCATCAGGTTCTT |
| 217 | GAAGAACCTGATGATGAGTAGTGAG | 1481 | CTCACTACTCATCATCAGGTTCTTC |
| 218 | GGAAGAACCTGATGATGAGTAGTGA | 1482 | TCACTACTCATCATCAGGTTCTTCC |
| 219 | AGGAAGAACCTGATGATGAGTAGTG | 1483 | CACTACTCATCATCAGGTTCTTCCT |
| 220 | AAGGAAGAACCTGATGATGAGTAGT | 1484 | ACTACTCATCATCAGGTTCTTCCTT |
| 221 | GAAGGAAGAACCTGATGATGAGTAG | 1485 | CTACTCATCATCAGGTTCTTCCTTC |
| 222 | AGAAGGAAGAACCTGATGATGAGTA | 1486 | TACTCATCATCAGGTTCTTCCTTCT |
| 223 | TAGAAGGAAGAACCTGATGATGAGT | 1487 | ACTCATCATCAGGTTCTTCCTTCTA |
| 224 | ATAGAAGGAAGAACCTGATGATGAG | 1488 | CTCATCATCAGGTTCTTCCTTCTAT |
| 225 | AATAGAAGGAAGAACCTGATGATGA | 1489 | TCATCATCAGGTTCTTCCTTCTATT |
| 226 | GAATAGAAGGAAGAACCTGATGATG | 1490 | CATCATCAGGTTCTTCCTTCTATTC |
| 227 | GGAATAGAAGGAAGAACCTGATGAT | 1491 | ATCATCAGGTTCTTCCTTCTATTCC |
| 228 | TGGAATAGAAGGAAGAACCTGATGA | 1492 | TCATCAGGTTCTTCCTTCTATTCCA |
| 229 | CTGGAATAGAAGGAAGAACCTGATG | 1493 | CATCAGGTTCTTCCTTCTATTCCAG |
| 230 | GCTGGAATAGAAGGAAGAACCTGAT | 1494 | ATCAGGTTCTTCCTTCTATTCCAGC |
| 231 | GGCTGGAATAGAAGGAAGAACCTGA | 1495 | TCAGGTTCTTCCTTCTATTCCAGCC |
| 232 | GGGCTGGAATAGAAGGAAGAACCTG | 1496 | CAGGTTCTTCCTTCTATTCCAGCCC |
| 233 | AGGGCTGGAATAGAAGGAAGAACCT | 1497 | AGGTTCTTCCTTCTATTCCAGCCCT |
| 234 | TAGGGCTGGAATAGAAGGAAGAACC | 1498 | GGTTCTTCCTTCTATTCCAGCCCTA |
| 235 | TTAGGGCTGGAATAGAAGGAAGAAC | 1499 | GTTCTTCCTTCTATTCCAGCCCTAA |
| 236 | GTTAGGGCTGGAATAGAAGGAAGAA | 1500 | TTCTTCCTTCTATTCCAGCCCTAAC |
| 237 | GGTTAGGGCTGGAATAGAAGGAAGA | 1501 | TCTTCCTTCTATTCCAGCCCTAACC |
| 238 | TGGTTAGGGCTGGAATAGAAGGAAG | 1502 | CTTCCTTCTATTCCAGCCCTAACCA |
| 239 | GTGGTTAGGGCTGGAATAGAAGGAA | 1503 | TTCCTTCTATTCCAGCCCTAACCAC |
| 240 | AGTGGTTAGGGCTGGAATAGAAGGA | 1504 | TCCTTCTATTCCAGCCCTAACCACT |
| 241 | GAGTGGTTAGGGCTGGAATAGAAGG | 1505 | CCTTCTATTCCAGCCCTAACCACTC |
| 242 | TGAGTGGTTAGGGCTGGAATAGAAG | 1506 | CTTCTATTCCAGCCCTAACCACTCA |
| 243 | CTGAGTGGTTAGGGCTGGAATAGAA | 1507 | TTCTATTCCAGCCCTAACCACTCAG |
| 244 | CCTGAGTGGTTAGGGCTGGAATAGA | 1508 | TCTATTCCAGCCCTAACCACTCAGG |
| 245 | TCCTGAGTGGTTAGGGCTGGAATAG | 1509 | CTATTCCAGCCCTAACCACTCAGGA |
| 246 | ATCCTGAGTGGTTAGGGCTGGAATA | 1510 | TATTCCAGCCCTAACCACTCAGGAT |
| 247 | AATCCTGAGTGGTTAGGGCTGGAAT | 1511 | ATTCCAGCCCTAACCACTCAGGATT |
| 248 | CAATCCTGAGTGGTTAGGGCTGGAA | 1512 | TTCCAGCCCTAACCACTCAGGATTG |
| 249 | CCAATCCTGAGTGGTTAGGGCTGGA | 1513 | TCCAGCCCTAACCACTCAGGATTGG |
| 250 | CCCAATCCTGAGTGGTTAGGGCTGG | 1514 | CCAGCCCTAACCACTCAGGATTGGG |
| 251 | GCCCAATCCTGAGTGGTTAGGGCTG | 1515 | CAGCCCTAACCACTCAGGATTGGGC |
| 252 | GGCCCAATCCTGAGTGGTTAGGGCT | 1516 | AGCCCTAACCACTCAGGATTGGGCC |
| 253 | CGGCCCAATCCTGAGTGGTTAGGGC | 1517 | GCCCTAACCACTCAGGATTGGGCCG |
| 254 | ACGGCCCAATCCTGAGTGGTTAGGG | 1518 | CCCTAACCACTCAGGATTGGGCCGT |
| 255 | AACGGCCCAATCCTGAGTGGTTAGG | 1519 | CCTAACCACTCAGGATTGGGCCGTT |
| 256 | AAACGGCCCAATCCTGAGTGGTTAG | 1520 | CTAACCACTCAGGATTGGGCCGTTT |
| 257 | CAAACGGCCCAATCCTGAGTGGTTA | 1521 | TAACCACTCAGGATTGGGCCGTTTG |
| 258 | ACAAACGGCCCAATCCTGAGTGGTT | 1522 | AACCACTCAGGATTGGGCCGTTTGT |
| 259 | CACAAACGGCCCAATCCTGAGTGGT | 1523 | ACCACTCAGGATTGGGCCGTTTGTG |
| 260 | ACACAAACGGCCCAATCCTGAGTGG | 1524 | CCACTCAGGATTGGGCCGTTTGTGT |
| 261 | GACACAAACGGCCCAATCCTGAGTG | 1525 | CACTCAGGATTGGGCCGTTTGTGTC |
| 262 | AGACACAAACGGCCCAATCCTGAGT | 1526 | ACTCAGGATTGGGCCGTTTGTGTCT |
| 263 | CAGACACAAACGGCCCAATCCTGAG | 1527 | CTCAGGATTGGGCCGTTTGTGTCTG |
| 264 | CCAGACACAAACGGCCCAATCCTGA | 1528 | TCAGGATTGGGCCGTTTGTGTCTGG |
| 265 | CCCAGACACAAACGGCCCAATCCTG | 1529 | CAGGATTGGGCCGTTTGTGTCTGGG |
| 266 | ACCCAGACACAAACGGCCCAATCCT | 1530 | AGGATTGGGCCGTTTGTGTCTGGGT |
| 267 | TACCCAGACACAAACGGCCCAATCC | 1531 | GGATTGGGCCGTTTGTGTCTGGGTA |
| 268 | ATACCCAGACACAAACGGCCCAATC | 1532 | GATTGGGCCGTTTGTGTCTGGGTAT |
| 269 | CATACCCAGACACAAACGGCCCAAT | 1533 | ATTGGGCCGTTTGTGTCTGGGTATG |
| 270 | ACATACCCAGACACAAACGGCCCAA | 1534 | TTGGGCCGTTTGTGTCTGGGTATGT |
| 271 | GACATACCCAGACACAAACGGCCCA | 1535 | TGGGCCGTTTGTGTCTGGGTATGTC |
| 272 | AGACATACCCAGACACAAACGGCCC | 1536 | GGGCCGTTTGTGTCTGGGTATGTCT |
| 273 | GAGACATACCCAGACACAAACGGCC | 1537 | GGCCGTTTGTGTCTGGGTATGTCTC |
| 274 | AGAGACATACCCAGACACAAACGGC | 1538 | GCCGTTTGTGTCTGGGTATGTCTCT |
| 275 | AAGAGACATACCCAGACACAAACGG | 1539 | CCGTTTGTGTCTGGGTATGTCTCTT |
| 276 | GAAGAGACATACCCAGACACAAACG | 1540 | CGTTTGTGTCTGGGTATGTCTCTTC |
| 277 | GGAAGAGACATACCCAGACACAAAC | 1541 | GTTTGTGTCTGGGTATGTCTCTTCC |
| 278 | TGGAAGAGACATACCCAGACACAAA | 1542 | TTTGTGTCTGGGTATGTCTCTTCCA |
| 279 | CTGGAAGAGACATACCCAGACACAA | 1543 | TTGTGTCTGGGTATGTCTCTTCCAG |
| 280 | GCTGGAAGAGACATACCCAGACACA | 1544 | TGTGTCTGGGTATGTCTCTTCCAGC |
| 281 | AGCTGGAAGAGACATACCCAGACAC | 1545 | GTGTCTGGGTATGTCTCTTCCAGCT |
| 282 | CAGCTGGAAGAGACATACCCAGACA | 1546 | TGTCTGGGTATGTCTCTTCCAGCTG |
| 283 | GCAGCTGGAAGAGACATACCCAGAC | 1547 | GTCTGGGTATGTCTCTTCCAGCTGC |
| 284 | GGCAGCTGGAAGAGACATACCCAGA | 1548 | TCTGGGTATGTCTCTTCCAGCTGCC |
| 285 | AGGCAGCTGGAAGAGACATACCCAG | 1549 | CTGGGTATGTCTCTTCCAGCTGCCT |
| 286 | CAGGCAGCTGGAAGAGACATACCCA | 1550 | TGGGTATGTCTCTTCCAGCTGCCTG |
| 287 | CCAGGCAGCTGGAAGAGACATACCC | 1551 | GGGTATGTCTCTTCCAGCTGCCTGG |
| 288 | CCCAGGCAGCTGGAAGAGACATACC | 1552 | GGTATGTCTCTTCCAGCTGCCTGGG |
| 289 | ACCCAGGCAGCTGGAAGAGACATAC | 1553 | GTATGTCTCTTCCAGCTGCCTGGGT |
| 290 | AACCCAGGCAGCTGGAAGAGACATA | 1554 | TATGTCTCTTCCAGCTGCCTGGGTT |
| 291 | AAACCCAGGCAGCTGGAAGAGACAT | 1555 | ATGTCTCTTCCAGCTGCCTGGGTTT |
| 292 | GAAACCCAGGCAGCTGGAAGAGACA | 1556 | TGTCTCTTCCAGCTGCCTGGGTTTC |
| 293 | GGAAACCCAGGCAGCTGGAAGAGAC | 1557 | GTCTCTTCCAGCTGCCTGGGTTTCC |
| 294 | AGGAAACCCAGGCAGCTGGAAGAGA | 1558 | TCTCTTCCAGCTGCCTGGGTTTCCT |
| 295 | CAGGAAACCCAGGCAGCTGGAAGAG | 1559 | CTCTTCCAGCTGCCTGGGTTTCCTG |
| 296 | CCAGGAAACCCAGGCAGCTGGAAGA | 1560 | TCTTCCAGCTGCCTGGGTTTCCTGG |
| 297 | TCCAGGAAACCCAGGCAGCTGGAAG | 1561 | CTTCCAGCTGCCTGGGTTTCCTGGA |
| 298 | TTCCAGGAAACCCAGGCAGCTGGAA | 1562 | TTCCAGCTGCCTGGGTTTCCTGGAA |
| 299 | TTTCCAGGAAACCCAGGCAGCTGGA | 1563 | TCCAGCTGCCTGGGTTTCCTGGAAA |
| 300 | CTTTCCAGGAAACCCAGGCAGCTGG | 1564 | CCAGCTGCCTGGGTTTCCTGGAAAG |
| 301 | TCTTTCCAGGAAACCCAGGCAGCTG | 1565 | CAGCTGCCTGGGTTTCCTGGAAAGA |
| 302 | TTCTTTCCAGGAAACCCAGGCAGCT | 1566 | AGCTGCCTGGGTTTCCTGGAAAGAA |
| 303 | GTTCTTTCCAGGAAACCCAGGCAGC | 1567 | GCTGCCTGGGTTTCCTGGAAAGAAC |
| 304 | AGTTCTTTCCAGGAAACCCAGGCAG | 1568 | CTGCCTGGGTTTCCTGGAAAGAACT |
| 305 | GAGTTCTTTCCAGGAAACCCAGGCA | 1569 | TGCCTGGGTTTCCTGGAAAGAACTC |
| 306 | AGAGTTCTTTCCAGGAAACCCAGGC | 1570 | GCCTGGGTTTCCTGGAAAGAACTCT |
| 307 | AAGAGTTCTTTCCAGGAAACCCAGG | 1571 | CCTGGGTTTCCTGGAAAGAACTCTT |
| 308 | TAAGAGTTCTTTCCAGGAAACCCAG | 1572 | CTGGGTTTCCTGGAAAGAACTCTTA |
| 309 | ATAAGAGTTCTTTCCAGGAAACCCA | 1573 | TGGGTTTCCTGGAAAGAACTCTTAT |
| 310 | GATAAGAGTTCTTTCCAGGAAACCC | 1574 | GGGTTTCCTGGAAAGAACTCTTATC |
| 311 | GGATAAGAGTTCTTTCCAGGAAACC | 1575 | GGTTTCCTGGAAAGAACTCTTATCC |
| 312 | GGGATAAGAGTTCTTTCCAGGAAAC | 1576 | GTTTCCTGGAAAGAACTCTTATCCC |
| 313 | GGGGATAAGAGTTCTTTCCAGGAAA | 1577 | TTTCCTGGAAAGAACTCTTATCCCC |
| 314 | TGGGGATAAGAGTTCTTTCCAGGAA | 1578 | TTCCTGGAAAGAACTCTTATCCCCA |
| 315 | CTGGGGATAAGAGTTCTTTCCAGGA | 1579 | TCCTGGAAAGAACTCTTATCCCCAG |
| 316 | CCTGGGGATAAGAGTTCTTTCCAGG | 1580 | CCTGGAAAGAACTCTTATCCCCAGG |
| 317 | TCCTGGGGATAAGAGTTCTTTCCAG | 1581 | CTGGAAAGAACTCTTATCCCCAGGA |
| 318 | TTCCTGGGGATAAGAGTTCTTTCCA | 1582 | TGGAAAGAACTCTTATCCCCAGGAA |
| 319 | GTTCCTGGGGATAAGAGTTCTTTCC | 1583 | GGAAAGAACTCTTATCCCCAGGAAC |
| 320 | AGTTCCTGGGGATAAGAGTTCTTTC | 1584 | GAAAGAACTCTTATCCCCAGGAACT |
| 321 | TAGTTCCTGGGGATAAGAGTTCTTT | 1585 | AAAGAACTCTTATCCCCAGGAACTA |
| 322 | CTAGTTCCTGGGGATAAGAGTTCTT | 1586 | AAGAACTCTTATCCCCAGGAACTAG |
| 323 | ACTAGTTCCTGGGGATAAGAGTTCT | 1587 | AGAACTCTTATCCCCAGGAACTAGT |
| 324 | AACTAGTTCCTGGGGATAAGAGTTC | 1588 | GAACTCTTATCCCCAGGAACTAGTT |
| 325 | AAACTAGTTCCTGGGGATAAGAGTT | 1589 | AACTCTTATCCCCAGGAACTAGTTT |
| 326 | CAAACTAGTTCCTGGGGATAAGAGT | 1590 | ACTCTTATCCCCAGGAACTAGTTTG |
| 327 | ACAAACTAGTTCCTGGGGATAAGAG | 1591 | CTCTTATCCCCAGGAACTAGTTTGT |
| 328 | AACAAACTAGTTCCTGGGGATAAGA | 1592 | TCTTATCCCCAGGAACTAGTTTGTT |
| 329 | CAACAAACTAGTTCCTGGGGATAAG | 1593 | CTTATCCCCAGGAACTAGTTTGTTG |
| 330 | TCAACAAACTAGTTCCTGGGGATAA | 1594 | TTATCCCCAGGAACTAGTTTGTTGA |
| 331 | TTCAACAAACTAGTTCCTGGGGATA | 1595 | TATCCCCAGGAACTAGTTTGTTGAA |
| 332 | ATTCAACAAACTAGTTCCTGGGGAT | 1596 | ATCCCCAGGAACTAGTTTGTTGAAT |
| 333 | TATTCAACAAACTAGTTCCTGGGGA | 1597 | TCCCCAGGAACTAGTTTGTTGAATA |
| 334 | TTATTCAACAAACTAGTTCCTGGGG | 1598 | CCCCAGGAACTAGTTTGTTGAATAA |
| 335 | TTTATTCAACAAACTAGTTCCTGGG | 1599 | CCCAGGAACTAGTTTGTTGAATAAA |
| 336 | ATTTATTCAACAAACTAGTTCCTGG | 1600 | CCAGGAACTAGTTTGTTGAATAAAT |
| 337 | CATTTATTCAACAAACTAGTTCCTG | 1601 | CAGGAACTAGTTTGTTGAATAAATG |
| 338 | GCATTTATTCAACAAACTAGTTCCT | 1602 | AGGAACTAGTTTGTTGAATAAATGC |
| 339 | AGCATTTATTCAACAAACTAGTTCC | 1603 | GGAACTAGTTTGTTGAATAAATGCT |
| 340 | CAGCATTTATTCAACAAACTAGTTC | 1604 | GAACTAGTTTGTTGAATAAATGCTG |
| 341 | CCAGCATTTATTCAACAAACTAGTT | 1605 | AACTAGTTTGTTGAATAAATGCTGG |
| 342 | ACCAGCATTTATTCAACAAACTAGT | 1606 | ACTAGTTTGTTGAATAAATGCTGGT |
| 343 | CACCAGCATTTATTCAACAAACTAG | 1607 | CTAGTTTGTTGAATAAATGCTGGTG |
| 344 | TCACCAGCATTTATTCAACAAACTA | 1608 | TAGTTTGTTGAATAAATGCTGGTGA |
| 345 | TTCACCAGCATTTATTCAACAAACT | 1609 | AGTTTGTTGAATAAATGCTGGTGAA |
| 346 | ATTCACCAGCATTTATTCAACAAAC | 1610 | GTTTGTTGAATAAATGCTGGTGAAT |
| 347 | CATTCACCAGCATTTATTCAACAAA | 1611 | TTTGTTGAATAAATGCTGGTGAATG |
| 348 | TCATTCACCAGCATTTATTCAACAA | 1612 | TTGTTGAATAAATGCTGGTGAATGA |
| 349 | TTCATTCACCAGCATTTATTCAACA | 1613 | TGTTGAATAAATGCTGGTGAATGAA |
| 350 | ATTCATTCACCAGCATTTATTCAAC | 1614 | GTTGAATAAATGCTGGTGAATGAAT |
| 351 | CATTCATTCACCAGCATTTATTCAA | 1615 | TTGAATAAATGCTGGTGAATGAATG |
| 352 | TCATTCATTCACCAGCATTTATTCA | 1616 | TGAATAAATGCTGGTGAATGAATGA |
| 353 | TTCATTCATTCACCAGCATTTATTC | 1617 | GAATAAATGCTGGTGAATGAATGAA |
| 354 | ATTCATTCATTCACCAGCATTTATT | 1618 | AATAAATGCTGGTGAATGAATGAAT |
| 355 | CATTCATTCATTCACCAGCATTTAT | 1619 | ATAAATGCTGGTGAATGAATGAATG |
| 356 | TCATTCATTCATTCACCAGCATTTA | 1620 | TAAATGCTGGTGAATGAATGAATGA |
| 357 | ATCATTCATTCATTCACCAGCATTT | 1621 | AAATGCTGGTGAATGAATGAATGAT |
| 358 | AATCATTCATTCATTCACCAGCATT | 1622 | AATGCTGGTGAATGAATGAATGATT |
| 359 | CAATCATTCATTCATTCACCAGCAT | 1623 | ATGCTGGTGAATGAATGAATGATTG |
| 360 | TCAATCATTCATTCATTCACCAGCA | 1624 | TGCTGGTGAATGAATGAATGATTGA |
| 361 | TTCAATCATTCATTCATTCACCAGC | 1625 | GCTGGTGAATGAATGAATGATTGAA |
| 362 | GTTCAATCATTCATTCATTCACCAG | 1626 | CTGGTGAATGAATGAATGATTGAAC |
| 363 | TGTTCAATCATTCATTCATTCACCA | 1627 | TGGTGAATGAATGAATGATTGAACA |
| 364 | CTGTTCAATCATTCATTCATTCACC | 1628 | GGTGAATGAATGAATGATTGAACAG |
| 365 | TCTGTTCAATCATTCATTCATTCAC | 1629 | GTGAATGAATGAATGATTGAACAGA |
| 366 | ATCTGTTCAATCATTCATTCATTCA | 1630 | TGAATGAATGAATGATTGAACAGAT |
| 367 | CATCTGTTCAATCATTCATTCATTC | 1631 | GAATGAATGAATGATTGAACAGATG |
| 368 | TCATCTGTTCAATCATTCATTCATT | 1632 | AATGAATGAATGATTGAACAGATGA |
| 369 | TTCATCTGTTCAATCATTCATTCAT | 1633 | ATGAATGAATGATTGAACAGATGAA |
| 370 | ATTCATCTGTTCAATCATTCATTCA | 1634 | TGAATGAATGATTGAACAGATGAAT |
| 371 | CATTCATCTGTTCAATCATTCATTC | 1635 | GAATGAATGATTGAACAGATGAATG |
| 372 | TCATTCATCTGTTCAATCATTCATT | 1636 | AATGAATGATTGAACAGATGAATGA |
| 373 | CTCATTCATCTGTTCAATCATTCAT | 1637 | ATGAATGATTGAACAGATGAATGAG |
| 374 | ACTCATTCATCTGTTCAATCATTCA | 1638 | TGAATGATTGAACAGATGAATGAGT |
| 375 | CACTCATTCATCTGTTCAATCATTC | 1639 | GAATGATTGAACAGATGAATGAGTG |
| 376 | TCACTCATTCATCTGTTCAATCATT | 1640 | AATGATTGAACAGATGAATGAGTGA |
| 377 | ATCACTCATTCATCTGTTCAATCAT | 1641 | ATGATTGAACAGATGAATGAGTGAT |
| 378 | CATCACTCATTCATCTGTTCAATCA | 1642 | TGATTGAACAGATGAATGAGTGATG |
| 379 | TCATCACTCATTCATCTGTTCAATC | 1643 | GATTGAACAGATGAATGAGTGATGA |
| 380 | CTCATCACTCATTCATCTGTTCAAT | 1644 | ATTGAACAGATGAATGAGTGATGAG |
| 381 | ACTCATCACTCATTCATCTGTTCAA | 1645 | TTGAACAGATGAATGAGTGATGAGT |
| 382 | TACTCATCACTCATTCATCTGTTCA | 1646 | TGAACAGATGAATGAGTGATGAGTA |
| 383 | CTACTCATCACTCATTCATCTGTTC | 1647 | GAACAGATGAATGAGTGATGAGTAG |
| 384 | TCTACTCATCACTCATTCATCTGTT | 1648 | AACAGATGAATGAGTGATGAGTAGA |
| 385 | ATCTACTCATCACTCATTCATCTGT | 1649 | ACAGATGAATGAGTGATGAGTAGAT |
| 386 | TATCTACTCATCACTCATTCATCTG | 1650 | CAGATGAATGAGTGATGAGTAGATA |
| 387 | TTATCTACTCATCACTCATTCATCT | 1651 | AGATGAATGAGTGATGAGTAGATAA |
| 388 | TTTATCTACTCATCACTCATTCATC | 1652 | GATGAATGAGTGATGAGTAGATAAA |
| 389 | TTTTATCTACTCATCACTCATTCAT | 1653 | ATGAATGAGTGATGAGTAGATAAAA |
| 390 | CTTTTATCTACTCATCACTCATTCA | 1654 | TGAATGAGTGATGAGTAGATAAAAG |
| 391 | CCTTTTATCTACTCATCACTCATTC | 1655 | GAATGAGTGATGAGTAGATAAAAGG |
| 392 | TCCTTTTATCTACTCATCACTCATT | 1656 | AATGAGTGATGAGTAGATAAAAGGA |
| 393 | ATCCTTTTATCTACTCATCACTCAT | 1657 | ATGAGTGATGAGTAGATAAAAGGAT |
| 394 | CATCCTTTTATCTACTCATCACTCA | 1658 | TGAGTGATGAGTAGATAAAAGGATG |
| 395 | CCATCCTTTTATCTACTCATCACTC | 1659 | GAGTGATGAGTAGATAAAAGGATGG |
| 396 | TCCATCCTTTTATCTACTCATCACT | 1660 | AGTGATGAGTAGATAAAAGGATGGA |
| 397 | ATCCATCCTTTTATCTACTCATCAC | 1661 | GTGATGAGTAGATAAAAGGATGGAT |
| 398 | CATCCATCCTTTTATCTACTCATCA | 1662 | TGATGAGTAGATAAAAGGATGGATG |
| 399 | CCATCCATCCTTTTATCTACTCATC | 1663 | GATGAGTAGATAAAAGGATGGATGG |
| 400 | TCCATCCATCCTTTTATCTACTCAT | 1664 | ATGAGTAGATAAAAGGATGGATGGA |
| 401 | CTCCATCCATCCTTTTATCTACTCA | 1665 | TGAGTAGATAAAAGGATGGATGGAG |
| 402 | TCTCCATCCATCCTTTTATCTACTC | 1666 | GAGTAGATAAAAGGATGGATGGAGA |
| 403 | CTCTCCATCCATCCTTTTATCTACT | 1667 | AGTAGATAAAAGGATGGATGGAGAG |
| 404 | TCTCTCCATCCATCCTTTTATCTAC | 1668 | GTAGATAAAAGGATGGATGGAGAGA |
| 405 | ATCTCTCCATCCATCCTTTTATCTA | 1669 | TAGATAAAAGGATGGATGGAGAGAT |
| 406 | CATCTCTCCATCCATCCTTTTATCT | 1670 | AGATAAAAGGATGGATGGAGAGATG |
| 407 | CCATCTCTCCATCCATCCTTTTATC | 1671 | GATAAAAGGATGGATGGAGAGATGG |
| 408 | CCCATCTCTCCATCCATCCTTTTAT | 1672 | ATAAAAGGATGGATGGAGAGATGGG |
| 409 | ACCCATCTCTCCATCCATCCTTTTA | 1673 | TAAAAGGATGGATGGAGAGATGGGT |
| 410 | CACCCATCTCTCCATCCATCCTTTT | 1674 | AAAAGGATGGATGGAGAGATGGGTG |
| 411 | TCACCCATCTCTCCATCCATCCTTT | 1675 | AAAGGATGGATGGAGAGATGGGTGA |
| 412 | CTCACCCATCTCTCCATCCATCCTT | 1676 | AAGGATGGATGGAGAGATGGGTGAG |
| 413 | ACTCACCCATCTCTCCATCCATCCT | 1677 | AGGATGGATGGAGAGATGGGTGAGT |
| 414 | TACTCACCCATCTCTCCATCCATCC | 1678 | GGATGGATGGAGAGATGGGTGAGTA |
| 415 | GTACTCACCCATCTCTCCATCCATC | 1679 | GATGGATGGAGAGATGGGTGAGTAC |
| 416 | TGTACTCACCCATCTCTCCATCCAT | 1680 | ATGGATGGAGAGATGGGTGAGTACA |
| 417 | ATGTACTCACCCATCTCTCCATCCA | 1681 | TGGATGGAGAGATGGGTGAGTACAT |
| 418 | CATGTACTCACCCATCTCTCCATCC | 1682 | GGATGGAGAGATGGGTGAGTACATG |
| 419 | CCATGTACTCACCCATCTCTCCATC | 1683 | GATGGAGAGATGGGTGAGTACATGG |
| 420 | TCCATGTACTCACCCATCTCTCCAT | 1684 | ATGGAGAGATGGGTGAGTACATGGA |
| 421 | ATCCATGTACTCACCCATCTCTCCA | 1685 | TGGAGAGATGGGTGAGTACATGGAT |
| 422 | CATCCATGTACTCACCCATCTCTCC | 1686 | GGAGAGATGGGTGAGTACATGGATG |
| 423 | CCATCCATGTACTCACCCATCTCTC | 1687 | GAGAGATGGGTGAGTACATGGATGG |
| 424 | TCCATCCATGTACTCACCCATCTCT | 1688 | AGAGATGGGTGAGTACATGGATGGA |
| 425 | ATCCATCCATGTACTCACCCATCTC | 1689 | GAGATGGGTGAGTACATGGATGGAT |
| 426 | TATCCATCCATGTACTCACCCATCT | 1690 | AGATGGGTGAGTACATGGATGGATA |
| 427 | CTATCCATCCATGTACTCACCCATC | 1691 | GATGGGTGAGTACATGGATGGATAG |
| 428 | TCTATCCATCCATGTACTCACCCAT | 1692 | ATGGGTGAGTACATGGATGGATAGA |
| 429 | ATCTATCCATCCATGTACTCACCCA | 1693 | TGGGTGAGTACATGGATGGATAGAT |
| 430 | CATCTATCCATCCATGTACTCACCC | 1694 | GGGTGAGTACATGGATGGATAGATG |
| 431 | CCATCTATCCATCCATGTACTCACC | 1695 | GGTGAGTACATGGATGGATAGATGG |
| 432 | TCCATCTATCCATCCATGTACTCAC | 1696 | GTGAGTACATGGATGGATAGATGGA |
| 433 | ATCCATCTATCCATCCATGTACTCA | 1697 | TGAGTACATGGATGGATAGATGGAT |
| 434 | CATCCATCTATCCATCCATGTACTC | 1698 | GAGTACATGGATGGATAGATGGATG |
| 435 | TCATCCATCTATCCATCCATGTACT | 1699 | AGTACATGGATGGATAGATGGATGA |
| 436 | CTCATCCATCTATCCATCCATGTAC | 1700 | GTACATGGATGGATAGATGGATGAG |
| 437 | ACTCATCCATCTATCCATCCATGTA | 1701 | TACATGGATGGATAGATGGATGAGT |
| 438 | AACTCATCCATCTATCCATCCATGT | 1702 | ACATGGATGGATAGATGGATGAGTT |
| 439 | CAACTCATCCATCTATCCATCCATG | 1703 | CATGGATGGATAGATGGATGAGTTG |
| 440 | CCAACTCATCCATCTATCCATCCAT | 1704 | ATGGATGGATAGATGGATGAGTTGG |
| 441 | ACCAACTCATCCATCTATCCATCCA | 1705 | TGGATGGATAGATGGATGAGTTGGT |
| 442 | CACCAACTCATCCATCTATCCATCC | 1706 | GGATGGATAGATGGATGAGTTGGTG |
| 443 | CCACCAACTCATCCATCTATCCATC | 1707 | GATGGATAGATGGATGAGTTGGTGG |
| 444 | CCCACCAACTCATCCATCTATCCAT | 1708 | ATGGATAGATGGATGAGTTGGTGGG |
| 445 | ACCCACCAACTCATCCATCTATCCA | 1709 | TGGATAGATGGATGAGTTGGTGGGT |
| 446 | TACCCACCAACTCATCCATCTATCC | 1710 | GGATAGATGGATGAGTTGGTGGGTA |
| 447 | CTACCCACCAACTCATCCATCTATC | 1711 | GATAGATGGATGAGTTGGTGGGTAG |
| 448 | TCTACCCACCAACTCATCCATCTAT | 1712 | ATAGATGGATGAGTTGGTGGGTAGA |
| 449 | ATCTACCCACCAACTCATCCATCTA | 1713 | TAGATGGATGAGTTGGTGGGTAGAT |
| 450 | AATCTACCCACCAACTCATCCATCT | 1714 | AGATGGATGAGTTGGTGGGTAGATT |
| 451 | GAATCTACCCACCAACTCATCCATC | 1715 | GATGGATGAGTTGGTGGGTAGATTC |
| 452 | CGAATCTACCCACCAACTCATCCAT | 1716 | ATGGATGAGTTGGTGGGTAGATTCG |
| 453 | ACGAATCTACCCACCAACTCATCCA | 1717 | TGGATGAGTTGGTGGGTAGATTCGT |
| 454 | CACGAATCTACCCACCAACTCATCC | 1718 | GGATGAGTTGGTGGGTAGATTCGTG |
| 455 | CCACGAATCTACCCACCAACTCATC | 1719 | GATGAGTTGGTGGGTAGATTCGTGG |
| 456 | GCCACGAATCTACCCACCAACTCAT | 1720 | ATGAGTTGGTGGGTAGATTCGTGGC |
| 457 | AGCCACGAATCTACCCACCAACTCA | 1721 | TGAGTTGGTGGGTAGATTCGTGGCT |
| 458 | TAGCCACGAATCTACCCACCAACTC | 1722 | GAGTTGGTGGGTAGATTCGTGGCTA |
| 459 | CTAGCCACGAATCTACCCACCAACT | 1723 | AGTTGGTGGGTAGATTCGTGGCTAG |
| 460 | TCTAGCCACGAATCTACCCACCAAC | 1724 | GTTGGTGGGTAGATTCGTGGCTAGA |
| 461 | ATCTAGCCACGAATCTACCCACCAA | 1725 | TTGGTGGGTAGATTCGTGGCTAGAT |
| 462 | CATCTAGCCACGAATCTACCCACCA | 1726 | TGGTGGGTAGATTCGTGGCTAGATG |
| 463 | CCATCTAGCCACGAATCTACCCACC | 1727 | GGTGGGTAGATTCGTGGCTAGATGG |
| 464 | TCCATCTAGCCACGAATCTACCCAC | 1728 | GTGGGTAGATTCGTGGCTAGATGGA |
| 465 | ATCCATCTAGCCACGAATCTACCCA | 1729 | TGGGTAGATTCGTGGCTAGATGGAT |
| 466 | CATCCATCTAGCCACGAATCTACCC | 1730 | GGGTAGATTCGTGGCTAGATGGATG |
| 467 | TCATCCATCTAGCCACGAATCTACC | 1731 | GGTAGATTCGTGGCTAGATGGATGA |
| 468 | ATCATCCATCTAGCCACGAATCTAC | 1732 | GTAGATTCGTGGCTAGATGGATGAT |
| 469 | CATCATCCATCTAGCCACGAATCTA | 1733 | TAGATTCGTGGCTAGATGGATGATG |
| 470 | CCATCATCCATCTAGCCACGAATCT | 1734 | AGATTCGTGGCTAGATGGATGATGG |
| 471 | TCCATCATCCATCTAGCCACGAATC | 1735 | GATTCGTGGCTAGATGGATGATGGA |
| 472 | ATCCATCATCCATCTAGCCACGAAT | 1736 | ATTCGTGGCTAGATGGATGATGGAT |
| 473 | CATCCATCATCCATCTAGCCACGAA | 1737 | TTCGTGGCTAGATGGATGATGGATG |
| 474 | CCATCCATCATCCATCTAGCCACGA | 1738 | TCGTGGCTAGATGGATGATGGATGG |
| 475 | TCCATCCATCATCCATCTAGCCACG | 1739 | CGTGGCTAGATGGATGATGGATGGA |
| 476 | ATCCATCCATCATCCATCTAGCCAC | 1740 | GTGGCTAGATGGATGATGGATGGAT |
| 477 | CATCCATCCATCATCCATCTAGCCA | 1741 | TGGCTAGATGGATGATGGATGGATG |
| 478 | CCATCCATCCATCATCCATCTAGCC | 1742 | GGCTAGATGGATGATGGATGGATGG |
| 479 | TCCATCCATCCATCATCCATCTAGC | 1743 | GCTAGATGGATGATGGATGGATGGA |
| 480 | GTCCATCCATCCATCATCCATCTAG | 1744 | CTAGATGGATGATGGATGGATGGAC |
| 481 | TGTCCATCCATCCATCATCCATCTA | 1745 | TAGATGGATGATGGATGGATGGACA |
| 482 | CTGTCCATCCATCCATCATCCATCT | 1746 | AGATGGATGATGGATGGATGGACAG |
| 483 | TCTGTCCATCCATCCATCATCCATC | 1747 | GATGGATGATGGATGGATGGACAGA |
| 484 | ATCTGTCCATCCATCCATCATCCAT | 1748 | ATGGATGATGGATGGATGGACAGAT |
| 485 | CATCTGTCCATCCATCCATCATCCA | 1749 | TGGATGATGGATGGATGGACAGATG |
| 486 | CCATCTGTCCATCCATCCATCATCC | 1750 | GGATGATGGATGGATGGACAGATGG |
| 487 | TCCATCTGTCCATCCATCCATCATC | 1751 | GATGATGGATGGATGGACAGATGGA |
| 488 | ATCCATCTGTCCATCCATCCATCAT | 1752 | ATGATGGATGGATGGACAGATGGAT |
| 489 | CATCCATCTGTCCATCCATCCATCA | 1753 | TGATGGATGGATGGACAGATGGATG |
| 490 | CCATCCATCTGTCCATCCATCCATC | 1754 | GATGGATGGATGGACAGATGGATGG |
| 491 | TCCATCCATCTGTCCATCCATCCAT | 1755 | ATGGATGGATGGACAGATGGATGGA |
| 492 | ATCCATCCATCTGTCCATCCATCCA | 1756 | TGGATGGATGGACAGATGGATGGAT |
| 493 | TATCCATCCATCTGTCCATCCATCC | 1757 | GGATGGATGGACAGATGGATGGATA |
| 494 | ATATCCATCCATCTGTCCATCCATC | 1758 | GATGGATGGACAGATGGATGGATAT |
| 495 | TATATCCATCCATCTGTCCATCCAT | 1759 | ATGGATGGACAGATGGATGGATATA |
| 496 | ATATATCCATCCATCTGTCCATCCA | 1760 | TGGATGGACAGATGGATGGATATAT |
| 497 | CATATATCCATCCATCTGTCCATCC | 1761 | GGATGGACAGATGGATGGATATATG |
| 498 | TCATATATCCATCCATCTGTCCATC | 1762 | GATGGACAGATGGATGGATATATGA |
| 499 | ATCATATATCCATCCATCTGTCCAT | 1763 | ATGGACAGATGGATGGATATATGAT |
| 500 | AATCATATATCCATCCATCTGTCCA | 1764 | TGGACAGATGGATGGATATATGATT |
| 501 | CAATCATATATCCATCCATCTGTCC | 1765 | GGACAGATGGATGGATATATGATTG |
| 502 | TCAATCATATATCCATCCATCTGTC | 1766 | GACAGATGGATGGATATATGATTGA |
| 503 | TTCAATCATATATCCATCCATCTGT | 1767 | ACAGATGGATGGATATATGATTGAA |
| 504 | GTTCAATCATATATCCATCCATCTG | 1768 | CAGATGGATGGATATATGATTGAAC |
| 505 | AGTTCAATCATATATCCATCCATCT | 1769 | AGATGGATGGATATATGATTGAACT |
| 506 | TAGTTCAATCATATATCCATCCATC | 1770 | GATGGATGGATATATGATTGAACTA |
| 507 | ATAGTTCAATCATATATCCATCCAT | 1771 | ATGGATGGATATATGATTGAACTAT |
| 508 | AATAGTTCAATCATATATCCATCCA | 1772 | TGGATGGATATATGATTGAACTATT |
| 509 | CAATAGTTCAATCATATATCCATCC | 1773 | GGATGGATATATGATTGAACTATTG |
| 510 | TCAATAGTTCAATCATATATCCATC | 1774 | GATGGATATATGATTGAACTATTGA |
| 511 | TTCAATAGTTCAATCATATATCCAT | 1775 | ATGGATATATGATTGAACTATTGAA |
| 512 | TTTCAATAGTTCAATCATATATCCA | 1776 | TGGATATATGATTGAACTATTGAAA |
| 513 | CTTTCAATAGTTCAATCATATATCC | 1777 | GGATATATGATTGAACTATTGAAAG |
| 514 | ACTTTCAATAGTTCAATCATATATC | 1778 | GATATATGATTGAACTATTGAAAGT |
| 515 | TACTTTCAATAGTTCAATCATATAT | 1779 | ATATATGATTGAACTATTGAAAGTA |
| 516 | ATACTTTCAATAGTTCAATCATATA | 1780 | TATATGATTGAACTATTGAAAGTAT |
| 517 | TATACTTTCAATAGTTCAATCATAT | 1781 | ATATGATTGAACTATTGAAAGTATA |
| 518 | CTATACTTTCAATAGTTCAATCATA | 1782 | TATGATTGAACTATTGAAAGTATAG |
| 519 | TCTATACTTTCAATAGTTCAATCAT | 1783 | ATGATTGAACTATTGAAAGTATAGA |
| 520 | ATCTATACTTTCAATAGTTCAATCA | 1784 | TGATTGAACTATTGAAAGTATAGAT |
| 521 | CATCTATACTTTCAATAGTTCAATC | 1785 | GATTGAACTATTGAAAGTATAGATG |
| 522 | ACATCTATACTTTCAATAGTTCAAT | 1786 | ATTGAACTATTGAAAGTATAGATGT |
| 523 | TACATCTATACTTTCAATAGTTCAA | 1787 | TTGAACTATTGAAAGTATAGATGTA |
| 524 | ATACATCTATACTTTCAATAGTTCA | 1788 | TGAACTATTGAAAGTATAGATGTAT |
| 525 | CATACATCTATACTTTCAATAGTTC | 1789 | GAACTATTGAAAGTATAGATGTATG |
| 526 | CCATACATCTATACTTTCAATAGTT | 1790 | AACTATTGAAAGTATAGATGTATGG |
| 527 | TCCATACATCTATACTTTCAATAGT | 1791 | ACTATTGAAAGTATAGATGTATGGA |
| 528 | ATCCATACATCTATACTTTCAATAG | 1792 | CTATTGAAAGTATAGATGTATGGAT |
| 529 | CATCCATACATCTATACTTTCAATA | 1793 | TATTGAAAGTATAGATGTATGGATG |
| 530 | CCATCCATACATCTATACTTTCAAT | 1794 | ATTGAAAGTATAGATGTATGGATGG |
| 531 | CCCATCCATACATCTATACTTTCAA | 1795 | TTGAAAGTATAGATGTATGGATGGG |
| 532 | ACCCATCCATACATCTATACTTTCA | 1796 | TGAAAGTATAGATGTATGGATGGGT |
| 533 | CACCCATCCATACATCTATACTTTC | 1797 | GAAAGTATAGATGTATGGATGGGTG |
| 534 | TCACCCATCCATACATCTATACTTT | 1798 | AAAGTATAGATGTATGGATGGGTGA |
| 535 | TTCACCCATCCATACATCTATACTT | 1799 | AAGTATAGATGTATGGATGGGTGAA |
| 536 | ATTCACCCATCCATACATCTATACT | 1800 | AGTATAGATGTATGGATGGGTGAAT |
| 537 | AATTCACCCATCCATACATCTATAC | 1801 | GTATAGATGTATGGATGGGTGAATT |
| 538 | AAATTCACCCATCCATACATCTATA | 1802 | TATAGATGTATGGATGGGTGAATTT |
| 539 | CAAATTCACCCATCCATACATCTAT | 1803 | ATAGATGTATGGATGGGTGAATTTG |
| 540 | CCAAATTCACCCATCCATACATCTA | 1804 | TAGATGTATGGATGGGTGAATTTGG |
| 541 | CCCAAATTCACCCATCCATACATCT | 1805 | AGATGTATGGATGGGTGAATTTGGG |
| 542 | CCCCAAATTCACCCATCCATACATC | 1806 | GATGTATGGATGGGTGAATTTGGGG |
| 543 | CCCCCAAATTCACCCATCCATACAT | 1807 | ATGTATGGATGGGTGAATTTGGGGG |
| 544 | ACCCCCAAATTCACCCATCCATACA | 1808 | TGTATGGATGGGTGAATTTGGGGGT |
| 545 | TACCCCCAAATTCACCCATCCATAC | 1809 | GTATGGATGGGTGAATTTGGGGGTA |
| 546 | TTACCCCCAAATTCACCCATCCATA | 1810 | TATGGATGGGTGAATTTGGGGGTAA |
| 547 | ATTACCCCCAAATTCACCCATCCAT | 1811 | ATGGATGGGTGAATTTGGGGGTAAT |
| 548 | AATTACCCCCAAATTCACCCATCCA | 1812 | TGGATGGGTGAATTTGGGGGTAATT |
| 549 | CAATTACCCCCAAATTCACCCATCC | 1813 | GGATGGGTGAATTTGGGGGTAATTG |
| 550 | ACAATTACCCCCAAATTCACCCATC | 1814 | GATGGGTGAATTTGGGGGTAATTGT |
| 551 | AACAATTACCCCCAAATTCACCCAT | 1815 | ATGGGTGAATTTGGGGGTAATTGTT |
| 552 | TAACAATTACCCCCAAATTCACCCA | 1816 | TGGGTGAATTTGGGGGTAATTGTTA |
| 553 | CTAACAATTACCCCCAAATTCACCC | 1817 | GGGTGAATTTGGGGGTAATTGTTAG |
| 554 | TCTAACAATTACCCCCAAATTCACC | 1818 | GGTGAATTTGGGGGTAATTGTTAGA |
| 555 | ATCTAACAATTACCCCCAAATTCAC | 1819 | GTGAATTTGGGGGTAATTGTTAGAT |
| 556 | CATCTAACAATTACCCCCAAATTCA | 1820 | TGAATTTGGGGGTAATTGTTAGATG |
| 557 | TCATCTAACAATTACCCCCAAATTC | 1821 | GAATTTGGGGGTAATTGTTAGATGA |
| 558 | ATCATCTAACAATTACCCCCAAATT | 1822 | AATTTGGGGGTAATTGTTAGATGAT |
| 559 | CATCATCTAACAATTACCCCCAAAT | 1823 | ATTTGGGGGTAATTGTTAGATGATG |
| 560 | CCATCATCTAACAATTACCCCCAAA | 1824 | TTTGGGGGTAATTGTTAGATGATGG |
| 561 | TCCATCATCTAACAATTACCCCCAA | 1825 | TTGGGGGTAATTGTTAGATGATGGA |
| 562 | ATCCATCATCTAACAATTACCCCCA | 1826 | TGGGGGTAATTGTTAGATGATGGAT |
| 563 | CATCCATCATCTAACAATTACCCCC | 1827 | GGGGGTAATTGTTAGATGATGGATG |
| 564 | TCATCCATCATCTAACAATTACCCC | 1828 | GGGGTAATTGTTAGATGATGGATGA |
| 565 | CTCATCCATCATCTAACAATTACCC | 1829 | GGGTAATTGTTAGATGATGGATGAG |
| 566 | ACTCATCCATCATCTAACAATTACC | 1830 | GGTAATTGTTAGATGATGGATGAGT |
| 567 | TACTCATCCATCATCTAACAATTAC | 1831 | GTAATTGTTAGATGATGGATGAGTA |
| 568 | ATACTCATCCATCATCTAACAATTA | 1832 | TAATTGTTAGATGATGGATGAGTAT |
| 569 | TATACTCATCCATCATCTAACAATT | 1833 | AATTGTTAGATGATGGATGAGTATA |
| 570 | CTATACTCATCCATCATCTAACAAT | 1834 | ATTGTTAGATGATGGATGAGTATAG |
| 571 | TCTATACTCATCCATCATCTAACAA | 1835 | TTGTTAGATGATGGATGAGTATAGA |
| 572 | ATCTATACTCATCCATCATCTAACA | 1836 | TGTTAGATGATGGATGAGTATAGAT |
| 573 | CATCTATACTCATCCATCATCTAAC | 1837 | GTTAGATGATGGATGAGTATAGATG |
| 574 | TCATCTATACTCATCCATCATCTAA | 1838 | TTAGATGATGGATGAGTATAGATGA |
| 575 | TTCATCTATACTCATCCATCATCTA | 1839 | TAGATGATGGATGAGTATAGATGAA |
| 576 | ATTCATCTATACTCATCCATCATCT | 1840 | AGATGATGGATGAGTATAGATGAAT |
| 577 | CATTCATCTATACTCATCCATCATC | 1841 | GATGATGGATGAGTATAGATGAATG |
| 578 | TCATTCATCTATACTCATCCATCAT | 1842 | ATGATGGATGAGTATAGATGAATGA |
| 579 | ATCATTCATCTATACTCATCCATCA | 1843 | TGATGGATGAGTATAGATGAATGAT |
| 580 | CATCATTCATCTATACTCATCCATC | 1844 | GATGGATGAGTATAGATGAATGATG |
| 581 | CCATCATTCATCTATACTCATCCAT | 1845 | ATGGATGAGTATAGATGAATGATGG |
| 582 | TCCATCATTCATCTATACTCATCCA | 1846 | TGGATGAGTATAGATGAATGATGGA |
| 583 | ATCCATCATTCATCTATACTCATCC | 1847 | GGATGAGTATAGATGAATGATGGAT |
| 584 | CATCCATCATTCATCTATACTCATC | 1848 | GATGAGTATAGATGAATGATGGATG |
| 585 | CCATCCATCATTCATCTATACTCAT | 1849 | ATGAGTATAGATGAATGATGGATGG |
| 586 | TCCATCCATCATTCATCTATACTCA | 1850 | TGAGTATAGATGAATGATGGATGGA |
| 587 | ATCCATCCATCATTCATCTATACTC | 1851 | GAGTATAGATGAATGATGGATGGAT |
| 588 | TATCCATCCATCATTCATCTATACT | 1852 | AGTATAGATGAATGATGGATGGATA |
| 589 | TTATCCATCCATCATTCATCTATAC | 1853 | GTATAGATGAATGATGGATGGATAA |
| 590 | GTTATCCATCCATCATTCATCTATA | 1854 | TATAGATGAATGATGGATGGATAAC |
| 591 | AGTTATCCATCCATCATTCATCTAT | 1855 | ATAGATGAATGATGGATGGATAACT |
| 592 | AAGTTATCCATCCATCATTCATCTA | 1856 | TAGATGAATGATGGATGGATAACTT |
| 593 | CAAGTTATCCATCCATCATTCATCT | 1857 | AGATGAATGATGGATGGATAACTTG |
| 594 | TCAAGTTATCCATCCATCATTCATC | 1858 | GATGAATGATGGATGGATAACTTGA |
| 595 | ATCAAGTTATCCATCCATCATTCAT | 1859 | ATGAATGATGGATGGATAACTTGAT |
| 596 | CATCAAGTTATCCATCCATCATTCA | 1860 | TGAATGATGGATGGATAACTTGATG |
| 597 | TCATCAAGTTATCCATCCATCATTC | 1861 | GAATGATGGATGGATAACTTGATGA |
| 598 | CTCATCAAGTTATCCATCCATCATT | 1862 | AATGATGGATGGATAACTTGATGAG |
| 599 | ACTCATCAAGTTATCCATCCATCAT | 1863 | ATGATGGATGGATAACTTGATGAGT |
| 600 | CACTCATCAAGTTATCCATCCATCA | 1864 | TGATGGATGGATAACTTGATGAGTG |
| 601 | CCACTCATCAAGTTATCCATCCATC | 1865 | GATGGATGGATAACTTGATGAGTGG |
| 602 | TCCACTCATCAAGTTATCCATCCAT | 1866 | ATGGATGGATAACTTGATGAGTGGA |
| 603 | ATCCACTCATCAAGTTATCCATCCA | 1867 | TGGATGGATAACTTGATGAGTGGAT |
| 604 | TATCCACTCATCAAGTTATCCATCC | 1868 | GGATGGATAACTTGATGAGTGGATA |
| 605 | CTATCCACTCATCAAGTTATCCATC | 1869 | GATGGATAACTTGATGAGTGGATAG |
| 606 | TCTATCCACTCATCAAGTTATCCAT | 1870 | ATGGATAACTTGATGAGTGGATAGA |
| 607 | ATCTATCCACTCATCAAGTTATCCA | 1871 | TGGATAACTTGATGAGTGGATAGAT |
| 608 | TATCTATCCACTCATCAAGTTATCC | 1872 | GGATAACTTGATGAGTGGATAGATA |
| 609 | CTATCTATCCACTCATCAAGTTATC | 1873 | GATAACTTGATGAGTGGATAGATAG |
| 610 | TCTATCTATCCACTCATCAAGTTAT | 1874 | ATAACTTGATGAGTGGATAGATAGA |
| 611 | ATCTATCTATCCACTCATCAAGTTA | 1875 | TAACTTGATGAGTGGATAGATAGAT |
| 612 | AATCTATCTATCCACTCATCAAGTT | 1876 | AACTTGATGAGTGGATAGATAGATT |
| 613 | CAATCTATCTATCCACTCATCAAGT | 1877 | ACTTGATGAGTGGATAGATAGATTG |
| 614 | GCAATCTATCTATCCACTCATCAAG | 1878 | CTTGATGAGTGGATAGATAGATTGC |
| 615 | AGCAATCTATCTATCCACTCATCAA | 1879 | TTGATGAGTGGATAGATAGATTGCT |
| 616 | CAGCAATCTATCTATCCACTCATCA | 1880 | TGATGAGTGGATAGATAGATTGCTG |
| 617 | CCAGCAATCTATCTATCCACTCATC | 1881 | GATGAGTGGATAGATAGATTGCTGG |
| 618 | TCCAGCAATCTATCTATCCACTCAT | 1882 | ATGAGTGGATAGATAGATTGCTGGA |
| 619 | ATCCAGCAATCTATCTATCCACTCA | 1883 | TGAGTGGATAGATAGATTGCTGGAT |
| 620 | TATCCAGCAATCTATCTATCCACTC | 1884 | GAGTGGATAGATAGATTGCTGGATA |
| 621 | CTATCCAGCAATCTATCTATCCACT | 1885 | AGTGGATAGATAGATTGCTGGATAG |
| 622 | TCTATCCAGCAATCTATCTATCCAC | 1886 | GTGGATAGATAGATTGCTGGATAGA |
| 623 | ATCTATCCAGCAATCTATCTATCCA | 1887 | TGGATAGATAGATTGCTGGATAGAT |
| 624 | CATCTATCCAGCAATCTATCTATCC | 1888 | GGATAGATAGATTGCTGGATAGATG |
| 625 | TCATCTATCCAGCAATCTATCTATC | 1889 | GATAGATAGATTGCTGGATAGATGA |
| 626 | ATCATCTATCCAGCAATCTATCTAT | 1890 | ATAGATAGATTGCTGGATAGATGAT |
| 627 | AATCATCTATCCAGCAATCTATCTA | 1891 | TAGATAGATTGCTGGATAGATGATT |
| 628 | CAATCATCTATCCAGCAATCTATCT | 1892 | AGATAGATTGCTGGATAGATGATTG |
| 629 | TCAATCATCTATCCAGCAATCTATC | 1893 | GATAGATTGCTGGATAGATGATTGA |
| 630 | GTCAATCATCTATCCAGCAATCTAT | 1894 | ATAGATTGCTGGATAGATGATTGAC |
| 631 | AGTCAATCATCTATCCAGCAATCTA | 1895 | TAGATTGCTGGATAGATGATTGACT |
| 632 | CAGTCAATCATCTATCCAGCAATCT | 1896 | AGATTGCTGGATAGATGATTGACTG |
| 633 | CCAGTCAATCATCTATCCAGCAATC | 1897 | GATTGCTGGATAGATGATTGACTGG |
| 634 | CCCAGTCAATCATCTATCCAGCAAT | 1898 | ATTGCTGGATAGATGATTGACTGGG |
| 635 | ACCCAGTCAATCATCTATCCAGCAA | 1899 | TTGCTGGATAGATGATTGACTGGGT |
| 636 | CACCCAGTCAATCATCTATCCAGCA | 1900 | TGCTGGATAGATGATTGACTGGGTG |
| 637 | CCACCCAGTCAATCATCTATCCAGC | 1901 | GCTGGATAGATGATTGACTGGGTGG |
| 638 | TCCACCCAGTCAATCATCTATCCAG | 1902 | CTGGATAGATGATTGACTGGGTGGA |
| 639 | ATCCACCCAGTCAATCATCTATCCA | 1903 | TGGATAGATGATTGACTGGGTGGAT |
| 640 | TATCCACCCAGTCAATCATCTATCC | 1904 | GGATAGATGATTGACTGGGTGGATA |
| 641 | CTATCCACCCAGTCAATCATCTATC | 1905 | GATAGATGATTGACTGGGTGGATAG |
| 642 | TCTATCCACCCAGTCAATCATCTAT | 1906 | ATAGATGATTGACTGGGTGGATAGA |
| 643 | ATCTATCCACCCAGTCAATCATCTA | 1907 | TAGATGATTGACTGGGTGGATAGAT |
| 644 | CATCTATCCACCCAGTCAATCATCT | 1908 | AGATGATTGACTGGGTGGATAGATG |
| 645 | TCATCTATCCACCCAGTCAATCATC | 1909 | GATGATTGACTGGGTGGATAGATGA |
| 646 | TTCATCTATCCACCCAGTCAATCAT | 1910 | ATGATTGACTGGGTGGATAGATGAA |
| 647 | TTTCATCTATCCACCCAGTCAATCA | 1911 | TGATTGACTGGGTGGATAGATGAAA |
| 648 | ATTTCATCTATCCACCCAGTCAATC | 1912 | GATTGACTGGGTGGATAGATGAAAT |
| 649 | CATTTCATCTATCCACCCAGTCAAT | 1913 | ATTGACTGGGTGGATAGATGAAATG |
| 650 | ACATTTCATCTATCCACCCAGTCAA | 1914 | TTGACTGGGTGGATAGATGAAATGT |
| 651 | AACATTTCATCTATCCACCCAGTCA | 1915 | TGACTGGGTGGATAGATGAAATGTT |
| 652 | CAACATTTCATCTATCCACCCAGTC | 1916 | GACTGGGTGGATAGATGAAATGTTG |
| 653 | CCAACATTTCATCTATCCACCCAGT | 1917 | ACTGGGTGGATAGATGAAATGTTGG |
| 654 | TCCAACATTTCATCTATCCACCCAG | 1918 | CTGGGTGGATAGATGAAATGTTGGA |
| 655 | ATCCAACATTTCATCTATCCACCCA | 1919 | TGGGTGGATAGATGAAATGTTGGAT |
| 656 | CATCCAACATTTCATCTATCCACCC | 1920 | GGGTGGATAGATGAAATGTTGGATG |
| 657 | TCATCCAACATTTCATCTATCCACC | 1921 | GGTGGATAGATGAAATGTTGGATGA |
| 658 | CTCATCCAACATTTCATCTATCCAC | 1922 | GTGGATAGATGAAATGTTGGATGAG |
| 659 | GCTCATCCAACATTTCATCTATCCA | 1923 | TGGATAGATGAAATGTTGGATGAGC |
| 660 | TGCTCATCCAACATTTCATCTATCC | 1924 | GGATAGATGAAATGTTGGATGAGCA |
| 661 | CTGCTCATCCAACATTTCATCTATC | 1925 | GATAGATGAAATGTTGGATGAGCAG |
| 662 | TCTGCTCATCCAACATTTCATCTAT | 1926 | ATAGATGAAATGTTGGATGAGCAGA |
| 663 | ATCTGCTCATCCAACATTTCATCTA | 1927 | TAGATGAAATGTTGGATGAGCAGAT |
| 664 | AATCTGCTCATCCAACATTTCATCT | 1928 | AGATGAAATGTTGGATGAGCAGATT |
| 665 | TAATCTGCTCATCCAACATTTCATC | 1929 | GATGAAATGTTGGATGAGCAGATTA |
| 666 | TTAATCTGCTCATCCAACATTTCAT | 1930 | ATGAAATGTTGGATGAGCAGATTAA |
| 667 | CTTAATCTGCTCATCCAACATTTCA | 1931 | TGAAATGTTGGATGAGCAGATTAAG |
| 668 | ACTTAATCTGCTCATCCAACATTTC | 1932 | GAAATGTTGGATGAGCAGATTAAGT |
| 669 | AACTTAATCTGCTCATCCAACATTT | 1933 | AAATGTTGGATGAGCAGATTAAGTT |
| 670 | CAACTTAATCTGCTCATCCAACATT | 1934 | AATGTTGGATGAGCAGATTAAGTTG |
| 671 | ACAACTTAATCTGCTCATCCAACAT | 1935 | ATGTTGGATGAGCAGATTAAGTTGT |
| 672 | TACAACTTAATCTGCTCATCCAACA | 1936 | TGTTGGATGAGCAGATTAAGTTGTA |
| 673 | ATACAACTTAATCTGCTCATCCAAC | 1937 | GTTGGATGAGCAGATTAAGTTGTAT |
| 674 | AATACAACTTAATCTGCTCATCCAA | 1938 | TTGGATGAGCAGATTAAGTIGTATT |
| 675 | CAATACAACTTAATCTGCTCATCCA | 1939 | TGGATGAGCAGATTAAGTTGTATTG |
| 676 | CCAATACAACTTAATCTGCTCATCC | 1940 | GGATGAGCAGATTAAGTTGTATTGG |
| 677 | TCCAATACAACTTAATCTGCTCATC | 1941 | GATGAGCAGATTAAGTTGTATTGGA |
| 678 | ATCCAATACAACTTAATCTGCTCAT | 1942 | ATGAGCAGATTAAGTTGTATTGGAT |
| 679 | CATCCAATACAACTTAATCTGCTCA | 1943 | TGAGCAGATTAAGTTGTATTGGATG |
| 680 | CCATCCAATACAACTTAATCTGCTC | 1944 | GAGCAGATTAAGTTGTATTGGATGG |
| 681 | CCCATCCAATACAACTTAATCTGCT | 1945 | AGCAGATTAAGTTGTATTGGATGGG |
| 682 | TCCCATCCAATACAACTTAATCTGC | 1946 | GCAGATTAAGTTGTATTGGATGGGA |
| 683 | ATCCCATCCAATACAACTTAATCTG | 1947 | CAGATTAAGTTGTATTGGATGGGAT |
| 684 | CATCCCATCCAATACAACTTAATCT | 1948 | AGATTAAGTTGTATTGGATGGGATG |
| 685 | CCATCCCATCCAATACAACTTAATC | 1949 | GATTAAGTTGTATTGGATGGGATGG |
| 686 | TCCATCCCATCCAATACAACTTAAT | 1950 | ATTAAGTTGTATTGGATGGGATGGA |
| 687 | ATCCATCCCATCCAATACAACTTAA | 1951 | TTAAGTTGTATTGGATGGGATGGAT |
| 688 | CATCCATCCCATCCAATACAACTTA | 1952 | TAAGTTGTATTGGATGGGATGGATG |
| 689 | CCATCCATCCCATCCAATACAACTT | 1953 | AAGTTGTATTGGATGGGATGGATGG |
| 690 | TCCATCCATCCCATCCAATACAACT | 1954 | AGTTGTATTGGATGGGATGGATGGA |
| 691 | TTCCATCCATCCCATCCAATACAAC | 1955 | GTTGTATTGGATGGGATGGATGGAA |
| 692 | CTTCCATCCATCCCATCCAATACAA | 1956 | TTGTATTGGATGGGATGGATGGAAG |
| 693 | ACTTCCATCCATCCCATCCAATACA | 1957 | TGTATTGGATGGGATGGATGGAAGT |
| 694 | CACTTCCATCCATCCCATCCAATAC | 1958 | GTATTGGATGGGATGGATGGAAGTG |
| 695 | ACACTTCCATCCATCCCATCCAATA | 1959 | TATTGGATGGGATGGATGGAAGTGT |
| 696 | CACACTTCCATCCATCCCATCCAAT | 1960 | ATTGGATGGGATGGATGGAAGTGTG |
| 697 | CCACACTTCCATCCATCCCATCCAA | 1961 | TTGGATGGGATGGATGGAAGTGTGG |
| 698 | ACCACACTTCCATCCATCCCATCCA | 1962 | TGGATGGGATGGATGGAAGTGTGGT |
| 699 | AACCACACTTCCATCCATCCCATCC | 1963 | GGATGGGATGGATGGAAGTGTGGTT |
| 700 | CAACCACACTTCCATCCATCCCATC | 1964 | GATGGGATGGATGGAAGTGTGGTTG |
| 701 | TCAACCACACTTCCATCCATCCCAT | 1965 | ATGGGATGGATGGAAGTGTGGTTGA |
| 702 | CTCAACCACACTTCCATCCATCCCA | 1966 | TGGGATGGATGGAAGTGTGGTTGAG |
| 703 | ACTCAACCACACTTCCATCCATCCC | 1967 | GGGATGGATGGAAGTGTGGTTGAGT |
| 704 | AACTCAACCACACTTCCATCCATCC | 1968 | GGATGGATGGAAGTGTGGTTGAGTT |
| 705 | TAACTCAACCACACTTCCATCCATC | 1969 | GATGGATGGAAGTGTGGTTGAGTTA |
| 706 | ATAACTCAACCACACTTCCATCCAT | 1970 | ATGGATGGAAGTGTGGTTGAGTTAT |
| 707 | AATAACTCAACCACACTTCCATCCA | 1971 | TGGATGGAAGTGTGGTTGAGTTATT |
| 708 | TAATAACTCAACCACACTTCCATCC | 1972 | GGATGGAAGTGTGGTTGAGTTATTA |
| 709 | CTAATAACTCAACCACACTTCCATC | 1973 | GATGGAAGTGTGGTTGAGTTATTAG |
| 710 | TCTAATAACTCAACCACACTTCCAT | 1974 | ATGGAAGTGTGGTTGAGTTATTAGA |
| 711 | TTCTAATAACTCAACCACACTTCCA | 1975 | TGGAAGTGTGGTTGAGTTATTAGAA |
| 712 | CTTCTAATAACTCAACCACACTTCC | 1976 | GGAAGTGTGGTTGAGTTATTAGAAG |
| 713 | CCTTCTAATAACTCAACCACACTTC | 1977 | GAAGTGTGGTTGAGTTATTAGAAGG |
| 714 | TCCTTCTAATAACTCAACCACACTT | 1978 | AAGTGTGGTTGAGTTATTAGAAGGA |
| 715 | TTCCTTCTAATAACTCAACCACACT | 1979 | AGTGTGGTTGAGTTATTAGAAGGAA |
| 716 | CTTCCTTCTAATAACTCAACCACAC | 1980 | GTGTGGTTGAGTTATTAGAAGGAAG |
| 717 | TCTTCCTTCTAATAACTCAACCACA | 1981 | TGTGGTTGAGTTATTAGAAGGAAGA |
| 718 | ATCTTCCTTCTAATAACTCAACCAC | 1982 | GTGGTTGAGTTATTAGAAGGAAGAT |
| 719 | AATCTTCCTTCTAATAACTCAACCA | 1983 | TGGTTGAGTTATTAGAAGGAAGATT |
| 720 | CAATCTTCCTTCTAATAACTCAACC | 1984 | GGTTGAGTTATTAGAAGGAAGATTG |
| 721 | TCAATCTTCCTTCTAATAACTCAAC | 1985 | GTTGAGTTATTAGAAGGAAGATTGA |
| 722 | CTCAATCTTCCTTCTAATAACTCAA | 1986 | TTGAGTTATTAGAAGGAAGATTGAG |
| 723 | ACTCAATCTTCCTTCTAATAACTCA | 1987 | TGAGTTATTAGAAGGAAGATTGAGT |
| 724 | TACTCAATCTTCCTTCTAATAACTC | 1988 | GAGTTATTAGAAGGAAGATTGAGTA |
| 725 | CTACTCAATCTTCCTTCTAATAACT | 1989 | AGTTATTAGAAGGAAGATTGAGTAG |
| 726 | TCTACTCAATCTTCCTTCTAATAAC | 1990 | GTTATTAGAAGGAAGATTGAGTAGA |
| 727 | ATCTACTCAATCTTCCTTCTAATAA | 1991 | TTATTAGAAGGAAGATTGAGTAGAT |
| 728 | TATCTACTCAATCTTCCTTCTAATA | 1992 | TATTAGAAGGAAGATTGAGTAGATA |
| 729 | CTATCTACTCAATCTTCCTTCTAAT | 1993 | ATTAGAAGGAAGATTGAGTAGATAG |
| 730 | CCTATCTACTCAATCTTCCTTCTAA | 1994 | TTAGAAGGAAGATTGAGTAGATAGG |
| 731 | ACCTATCTACTCAATCTTCCTTCTA | 1995 | TAGAAGGAAGATTGAGTAGATAGGT |
| 732 | CACCTATCTACTCAATCTTCCTTCT | 1996 | AGAAGGAAGATTGAGTAGATAGGTG |
| 733 | TCACCTATCTACTCAATCTTCCTTC | 1997 | GAAGGAAGATTGAGTAGATAGGTGA |
| 734 | TTCACCTATCTACTCAATCTTCCTT | 1998 | AAGGAAGATTGAGTAGATAGGTGAA |
| 735 | ATTCACCTATCTACTCAATCTTCCT | 1999 | AGGAAGATTGAGTAGATAGGTGAAT |
| 736 | AATTCACCTATCTACTCAATCTTCC | 2000 | GGAAGATTGAGTAGATAGGTGAATT |
| 737 | AAATTCACCTATCTACTCAATCTTC | 2001 | GAAGATTGAGTAGATAGGTGAATTT |
| 738 | CAAATTCACCTATCTACTCAATCTT | 2002 | AAGATTGAGTAGATAGGTGAATTTG |
| 739 | ACAAATTCACCTATCTACTCAATCT | 2003 | AGATTGAGTAGATAGGTGAATTTGT |
| 740 | AACAAATTCACCTATCTACTCAATC | 2004 | GATTGAGTAGATAGGTGAATTTGTT |
| 741 | CAACAAATTCACCTATCTACTCAAT | 2005 | ATTGAGTAGATAGGTGAATTTGTTG |
| 742 | TCAACAAATTCACCTATCTACTCAA | 2006 | TTGAGTAGATAGGTGAATTTGTTGA |
| 743 | ATCAACAAATTCACCTATCTACTCA | 2007 | TGAGTAGATAGGTGAATTTGTTGAT |
| 744 | TATCAACAAATTCACCTATCTACTC | 2008 | GAGTAGATAGGTGAATTTGTTGATA |
| 745 | CTATCAACAAATTCACCTATCTACT | 2009 | AGTAGATAGGTGAATTTGTTGATAG |
| 746 | ACTATCAACAAATTCACCTATCTAC | 2010 | GTAGATAGGTGAATTTGTTGATAGT |
| 747 | GACTATCAACAAATTCACCTATCTA | 2011 | TAGATAGGTGAATTTGTTGATAGTC |
| 748 | TGACTATCAACAAATTCACCTATCT | 2012 | AGATAGGTGAATTTGTTGATAGTCA |
| 749 | CTGACTATCAACAAATTCACCTATC | 2013 | GATAGGTGAATTTGTTGATAGTCAG |
| 750 | TCTGACTATCAACAAATTCACCTAT | 2014 | ATAGGTGAATTTGTTGATAGTCAGA |
| 751 | ATCTGACTATCAACAAATTCACCTA | 2015 | TAGGTGAATTTGTTGATAGTCAGAT |
| 752 | CATCTGACTATCAACAAATTCACCT | 2016 | AGGTGAATTTGTTGATAGTCAGATG |
| 753 | CCATCTGACTATCAACAAATTCACC | 2017 | GGTGAATTTGTTGATAGTCAGATGG |
| 754 | CCCATCTGACTATCAACAAATTCAC | 2018 | GTGAATTTGTTGATAGTCAGATGGG |
| 755 | ACCCATCTGACTATCAACAAATTCA | 2019 | TGAATTTGTTGATAGTCAGATGGGT |
| 756 | TACCCATCTGACTATCAACAAATTC | 2020 | GAATTTGTTGATAGTCAGATGGGTA |
| 757 | CTACCCATCTGACTATCAACAAATT | 2021 | AATTTGTTGATAGTCAGATGGGTAG |
| 758 | TCTACCCATCTGACTATCAACAAAT | 2022 | ATTTGTTGATAGTCAGATGGGTAGA |
| 759 | ATCTACCCATCTGACTATCAACAAA | 2023 | TTTGTTGATAGTCAGATGGGTAGAT |
| 760 | TATCTACCCATCTGACTATCAACAA | 2024 | TTGTTGATAGTCAGATGGGTAGATA |
| 761 | CTATCTACCCATCTGACTATCAACA | 2025 | TGTTGATAGTCAGATGGGTAGATAG |
| 762 | CCTATCTACCCATCTGACTATCAAC | 2026 | GTTGATAGTCAGATGGGTAGATAGG |
| 763 | ACCTATCTACCCATCTGACTATCAA | 2027 | TTGATAGTCAGATGGGTAGATAGGT |
| 764 | TACCTATCTACCCATCTGACTATCA | 2028 | TGATAGTCAGATGGGTAGATAGGTA |
| 765 | CTACCTATCTACCCATCTGACTATC | 2029 | GATAGTCAGATGGGTAGATAGGTAG |
| 766 | TCTACCTATCTACCCATCTGACTAT | 2030 | ATAGTCAGATGGGTAGATAGGTAGA |
| 767 | ATCTACCTATCTACCCATCTGACTA | 2031 | TAGTCAGATGGGTAGATAGGTAGAT |
| 768 | CATCTACCTATCTACCCATCTGACT | 2032 | AGTCAGATGGGTAGATAGGTAGATG |
| 769 | CCATCTACCTATCTACCCATCTGAC | 2033 | GTCAGATGGGTAGATAGGTAGATGG |
| 770 | TCCATCTACCTATCTACCCATCTGA | 2034 | TCAGATGGGTAGATAGGTAGATGGA |
| 771 | ATCCATCTACCTATCTACCCATCTG | 2035 | CAGATGGGTAGATAGGTAGATGGAT |
| 772 | CATCCATCTACCTATCTACCCATCT | 2036 | AGATGGGTAGATAGGTAGATGGATG |
| 773 | CCATCCATCTACCTATCTACCCATC | 2037 | GATGGGTAGATAGGTAGATGGATGG |
| 774 | TCCATCCATCTACCTATCTACCCAT | 2038 | ATGGGTAGATAGGTAGATGGATGGA |
| 775 | ATCCATCCATCTACCTATCTACCCA | 2039 | TGGGTAGATAGGTAGATGGATGGAT |
| 776 | CATCCATCCATCTACCTATCTACCC | 2040 | GGGTAGATAGGTAGATGGATGGATG |
| 777 | CCATCCATCCATCTACCTATCTACC | 2041 | GGTAGATAGGTAGATGGATGGATGG |
| 778 | TCCATCCATCCATCTACCTATCTAC | 2042 | GTAGATAGGTAGATGGATGGATGGA |
| 779 | ATCCATCCATCCATCTACCTATCTA | 2043 | TAGATAGGTAGATGGATGGATGGAT |
| 780 | CATCCATCCATCCATCTACCTATCT | 2044 | AGATAGGTAGATGGATGGATGGATG |
| 781 | CCATCCATCCATCCATCTACCTATC | 2045 | GATAGGTAGATGGATGGATGGATGG |
| 782 | TCCATCCATCCATCCATCTACCTAT | 2046 | ATAGGTAGATGGATGGATGGATGGA |
| 783 | ATCCATCCATCCATCCATCTACCTA | 2047 | TAGGTAGATGGATGGATGGATGGAT |
| 784 | CATCCATCCATCCATCCATCTACCT | 2048 | AGGTAGATGGATGGATGGATGGATG |
| 785 | CCATCCATCCATCCATCCATCTACC | 2049 | GGTAGATGGATGGATGGATGGATGG |
| 786 | TCCATCCATCCATCCATCCATCTAC | 2050 | GTAGATGGATGGATGGATGGATGGA |
| 787 | ATCCATCCATCCATCCATCCATCTA | 2051 | TAGATGGATGGATGGATGGATGGAT |
| 788 | CATCCATCCATCCATCCATCCATCT | 2052 | AGATGGATGGATGGATGGATGGATG |
| 789 | ACATCCATCCATCCATCCATCCATC | 2053 | GATGGATGGATGGATGGATGGATGT |
| 790 | TACATCCATCCATCCATCCATCCAT | 2054 | ATGGATGGATGGATGGATGGATGTA |
| 791 | ATACATCCATCCATCCATCCATCCA | 2055 | TGGATGGATGGATGGATGGATGTAT |
| 792 | TATACATCCATCCATCCATCCATCC | 2056 | GGATGGATGGATGGATGGATGTATA |
| 793 | CTATACATCCATCCATCCATCCATC | 2057 | GATGGATGGATGGATGGATGTATAG |
| 794 | CCTATACATCCATCCATCCATCCAT | 2058 | ATGGATGGATGGATGGATGTATAGG |
| 795 | GCCTATACATCCATCCATCCATCCA | 2059 | TGGATGGATGGATGGATGTATAGGC |
| 796 | TGCCTATACATCCATCCATCCATCC | 2060 | GGATGGATGGATGGATGTATAGGCA |
| 797 | CTGCCTATACATCCATCCATCCATC | 2061 | GATGGATGGATGGATGTATAGGCAG |
| 798 | TCTGCCTATACATCCATCCATCCAT | 2062 | ATGGATGGATGGATGTATAGGCAGA |
| 799 | ATCTGCCTATACATCCATCCATCCA | 2063 | TGGATGGATGGATGTATAGGCAGAT |
| 800 | CATCTGCCTATACATCCATCCATCC | 2064 | GGATGGATGGATGTATAGGCAGATG |
| 801 | CCATCTGCCTATACATCCATCCATC | 2065 | GATGGATGGATGTATAGGCAGATGG |
| 802 | TCCATCTGCCTATACATCCATCCAT | 2066 | ATGGATGGATGTATAGGCAGATGGA |
| 803 | GTCCATCTGCCTATACATCCATCCA | 2067 | TGGATGGATGTATAGGCAGATGGAC |
| 804 | TGTCCATCTGCCTATACATCCATCC | 2068 | GGATGGATGTATAGGCAGATGGACA |
| 805 | TTGTCCATCTGCCTATACATCCATC | 2069 | GATGGATGTATAGGCAGATGGACAA |
| 806 | TTTGTCCATCTGCCTATACATCCAT | 2070 | ATGGATGTATAGGCAGATGGACAAA |
| 807 | ATTTGTCCATCTGCCTATACATCCA | 2071 | TGGATGTATAGGCAGATGGACAAAT |
| 808 | CATTTGTCCATCTGCCTATACATCC | 2072 | GGATGTATAGGCAGATGGACAAATG |
| 809 | CCATTTGTCCATCTGCCTATACATC | 2073 | GATGTATAGGCAGATGGACAAATGG |
| 810 | TCCATTTGTCCATCTGCCTATACAT | 2074 | ATGTATAGGCAGATGGACAAATGGA |
| 811 | ATCCATTTGTCCATCTGCCTATACA | 2075 | TGTATAGGCAGATGGACAAATGGAT |
| 812 | CATCCATTTGTCCATCTGCCTATAC | 2076 | GTATAGGCAGATGGACAAATGGATG |
| 813 | TCATCCATTTGTCCATCTGCCTATA | 2077 | TATAGGCAGATGGACAAATGGATGA |
| 814 | TTCATCCATTTGTCCATCTGCCTAT | 2078 | ATAGGCAGATGGACAAATGGATGAA |
| 815 | ATTCATCCATTTGTCCATCTGCCTA | 2079 | TAGGCAGATGGACAAATGGATGAAT |
| 816 | CATTCATCCATTTGTCCATCTGCCT | 2080 | AGGCAGATGGACAAATGGATGAATG |
| 817 | CCATTCATCCATTTGTCCATCTGCC | 2081 | GGCAGATGGACAAATGGATGAATGG |
| 818 | CCCATTCATCCATTTGTCCATCTGC | 2082 | GCAGATGGACAAATGGATGAATGGG |
| 819 | ACCCATTCATCCATTTGTCCATCTG | 2083 | CAGATGGACAAATGGATGAATGGGT |
| 820 | CACCCATTCATCCATTTGTCCATCT | 2084 | AGATGGACAAATGGATGAATGGGTG |
| 821 | CCACCCATTCATCCATTTGTCCATC | 2085 | GATGGACAAATGGATGAATGGGTGG |
| 822 | CCCACCCATTCATCCATTTGTCCAT | 2086 | ATGGACAAATGGATGAATGGGTGGG |
| 823 | ACCCACCCATTCATCCATTTGTCCA | 2087 | TGGACAAATGGATGAATGGGTGGGT |
| 824 | CACCCACCCATTCATCCATTTGTCC | 2088 | GGACAAATGGATGAATGGGTGGGTG |
| 825 | CCACCCACCCATTCATCCATTTGTC | 2089 | GACAAATGGATGAATGGGTGGGTGG |
| 826 | TCCACCCACCCATTCATCCATTTGT | 2090 | ACAAATGGATGAATGGGTGGGTGGA |
| 827 | ATCCACCCACCCATTCATCCATTTG | 2091 | CAAATGGATGAATGGGTGGGTGGAT |
| 828 | CATCCACCCACCCATTCATCCATTT | 2092 | AAATGGATGAATGGGTGGGTGGATG |
| 829 | TCATCCACCCACCCATTCATCCATT | 2093 | AATGGATGAATGGGTGGGTGGATGA |
| 830 | TTCATCCACCCACCCATTCATCCAT | 2094 | ATGGATGAATGGGTGGGTGGATGAA |
| 831 | ATTCATCCACCCACCCATTCATCCA | 2095 | TGGATGAATGGGTGGGTGGATGAAT |
| 832 | CATTCATCCACCCACCCATTCATCC | 2096 | GGATGAATGGGTGGGTGGATGAATG |
| 833 | CCATTCATCCACCCACCCATTCATC | 2097 | GATGAATGGGTGGGTGGATGAATGG |
| 834 | TCCATTCATCCACCCACCCATTCAT | 2098 | ATGAATGGGTGGGTGGATGAATGGA |
| 835 | TTCCATTCATCCACCCACCCATTCA | 2099 | TGAATGGGTGGGTGGATGAATGGAA |
| 836 | CTTCCATTCATCCACCCACCCATTC | 2100 | GAATGGGTGGGTGGATGAATGGAAG |
| 837 | CCTTCCATTCATCCACCCACCCATT | 2101 | AATGGGTGGGTGGATGAATGGAAGG |
| 838 | TCCTTCCATTCATCCACCCACCCAT | 2102 | ATGGGTGGGTGGATGAATGGAAGGA |
| 839 | ATCCTTCCATTCATCCACCCACCCA | 2103 | TGGGTGGGTGGATGAATGGAAGGAT |
| 840 | CATCCTTCCATTCATCCACCCACCC | 2104 | GGGTGGGTGGATGAATGGAAGGATG |
| 841 | ACATCCTTCCATTCATCCACCCACC | 2105 | GGTGGGTGGATGAATGGAAGGATGT |
| 842 | CACATCCTTCCATTCATCCACCCAC | 2106 | GTGGGTGGATGAATGGAAGGATGTG |
| 843 | ACACATCCTTCCATTCATCCACCCA | 2107 | TGGGTGGATGAATGGAAGGATGTGT |
| 844 | CACACATCCTTCCATTCATCCACCC | 2108 | GGGTGGATGAATGGAAGGATGTGTG |
| 845 | CCACACATCCTTCCATTCATCCACC | 2109 | GGTGGATGAATGGAAGGATGTGTGG |
| 846 | ACCACACATCCTTCCATTCATCCAC | 2110 | GTGGATGAATGGAAGGATGTGTGGT |
| 847 | AACCACACATCCTTCCATTCATCCA | 2111 | TGGATGAATGGAAGGATGTGTGGTT |
| 848 | CAACCACACATCCTTCCATTCATCC | 2112 | GGATGAATGGAAGGATGTGTGGTTG |
| 849 | TCAACCACACATCCTTCCATTCATC | 2113 | GATGAATGGAAGGATGTGTGGTTGA |
| 850 | TTCAACCACACATCCTTCCATTCAT | 2114 | ATGAATGGAAGGATGTGTGGTTGAA |
| 851 | GTTCAACCACACATCCTTCCATTCA | 2115 | TGAATGGAAGGATGTGTGGTTGAAC |
| 852 | AGTTCAACCACACATCCTTCCATTC | 2116 | GAATGGAAGGATGTGTGGTTGAACT |
| 853 | TAGTTCAACCACACATCCTTCCATT | 2117 | AATGGAAGGATGTGTGGTTGAACTA |
| 854 | ATAGTTCAACCACACATCCTTCCAT | 2118 | ATGGAAGGATGTGTGGTTGAACTAT |
| 855 | AATAGTTCAACCACACATCCTTCCA | 2119 | TGGAAGGATGTGTGGTTGAACTATT |
| 856 | CAATAGTTCAACCACACATCCTTCC | 2120 | GGAAGGATGTGTGGTTGAACTATTG |
| 857 | GCAATAGTTCAACCACACATCCTTC | 2121 | GAAGGATGTGTGGTTGAACTATTGC |
| 858 | TGCAATAGTTCAACCACACATCCTT | 2122 | AAGGATGTGTGGTTGAACTATTGCA |
| 859 | TTGCAATAGTTCAACCACACATCCT | 2123 | AGGATGTGTGGTTGAACTATTGCAA |
| 860 | CTTGCAATAGTTCAACCACACATCC | 2124 | GGATGTGTGGTTGAACTATTGCAAG |
| 861 | ACTTGCAATAGTTCAACCACACATC | 2125 | GATGTGTGGTTGAACTATTGCAAGT |
| 862 | TACTTGCAATAGTTCAACCACACAT | 2126 | ATGTGTGGTTGAACTATTGCAAGTA |
| 863 | ATACTTGCAATAGTTCAACCACACA | 2127 | TGTGTGGTTGAACTATTGCAAGTAT |
| 864 | AATACTTGCAATAGTTCAACCACAC | 2128 | GTGTGGTTGAACTATTGCAAGTATT |
| 865 | CAATACTTGCAATAGTTCAACCACA | 2129 | TGTGGTTGAACTATTGCAAGTATTG |
| 866 | TCAATACTTGCAATAGTTCAACCAC | 2130 | GTGGTTGAACTATTGCAAGTATTGA |
| 867 | ATCAATACTTGCAATAGTTCAACCA | 2131 | TGGTTGAACTATTGCAAGTATTGAT |
| 868 | TATCAATACTTGCAATAGTTCAACC | 2132 | GGTTGAACTATTGCAAGTATTGATA |
| 869 | TTATCAATACTTGCAATAGTTCAAC | 2133 | GTTGAACTATTGCAAGTATTGATAA |
| 870 | ATTATCAATACTTGCAATAGTTCAA | 2134 | TTGAACTATTGCAAGTATTGATAAT |
| 871 | AATTATCAATACTTGCAATAGTTCA | 2135 | TGAACTATTGCAAGTATTGATAATT |
| 872 | CAATTATCAATACTTGCAATAGTTC | 2136 | GAACTATTGCAAGTATTGATAATTG |
| 873 | CCAATTATCAATACTTGCAATAGTT | 2137 | AACTATTGCAAGTATTGATAATTGG |
| 874 | CCCAATTATCAATACTTGCAATAGT | 2138 | ACTATTGCAAGTATTGATAATTGGG |
| 875 | ACCCAATTATCAATACTTGCAATAG | 2139 | CTATTGCAAGTATTGATAATTGGGT |
| 876 | AACCCAATTATCAATACTTGCAATA | 2140 | TATTGCAAGTATTGATAATTGGGTT |
| 877 | GAACCCAATTATCAATACTTGCAAT | 2141 | ATTGCAAGTATTGATAATTGGGTTC |
| 878 | TGAACCCAATTATCAATACTTGCAA | 2142 | TTGCAAGTATTGATAATTGGGTTCA |
| 879 | ATGAACCCAATTATCAATACTTGCA | 2143 | TGCAAGTATTGATAATTGGGTTCAT |
| 880 | TATGAACCCAATTATCAATACTTGC | 2144 | GCAAGTATTGATAATTGGGTTCATA |
| 881 | TTATGAACCCAATTATCAATACTTG | 2145 | CAAGTATTGATAATTGGGTTCATAA |
| 882 | ATTATGAACCCAATTATCAATACTT | 2146 | AAGTATTGATAATTGGGTTCATAAT |
| 883 | AATTATGAACCCAATTATCAATACT | 2147 | AGTATTGATAATTGGGTTCATAATT |
| 884 | AAATTATGAACCCAATTATCAATAC | 2148 | GTATTGATAATTGGGTTCATAATTT |
| 885 | GAAATTATGAACCCAATTATCAATA | 2149 | TATTGATAATTGGGTTCATAATTTC |
| 886 | AGAAATTATGAACCCAATTATCAAT | 2150 | ATTGATAATTGGGTTCATAATTTCT |
| 887 | CAGAAATTATGAACCCAATTATCAA | 2151 | TTGATAATTGGGTTCATAATTTCTG |
| 888 | TCAGAAATTATGAACCCAATTATCA | 2152 | TGATAATTGGGTTCATAATTTCTGA |
| 889 | TTCAGAAATTATGAACCCAATTATC | 2153 | GATAATTGGGTTCATAATTTCTGAA |
| 890 | ATTCAGAAATTATGAACCCAATTAT | 2154 | ATAATTGGGTTCATAATTTCTGAAT |
| 891 | TATTCAGAAATTATGAACCCAATTA | 2155 | TAATTGGGTTCATAATTTCTGAATA |
| 892 | ATATTCAGAAATTATGAACCCAATT | 2156 | AATTGGGTTCATAATTTCTGAATAT |
| 893 | AATATTCAGAAATTATGAACCCAAT | 2157 | ATTGGGTTCATAATTTCTGAATATT |
| 894 | AAATATTCAGAAATTATGAACCCAA | 2158 | TTGGGTTCATAATTTCTGAATATTT |
| 895 | TAAATATTCAGAAATTATGAACCCA | 2159 | TGGGTTCATAATTTCTGAATATTTA |
| 896 | CTAAATATTCAGAAATTATGAACCC | 2160 | GGGTTCATAATTTCTGAATATTTAG |
| 897 | TCTAAATATTCAGAAATTATGAACC | 2161 | GGTTCATAATTTCTGAATATTTAGA |
| 898 | ATCTAAATATTCAGAAATTATGAAC | 2162 | GTTCATAATTTCTGAATATTTAGAT |
| 899 | CATCTAAATATTCAGAAATTATGAA | 2163 | TTCATAATTTCTGAATATTTAGATG |
| 900 | CCATCTAAATATTCAGAAATTATGA | 2164 | TCATAATTTCTGAATATTTAGATGG |
| 901 | TCCATCTAAATATTCAGAAATTATG | 2165 | CATAATTTCTGAATATTTAGATGGA |
| 902 | ATCCATCTAAATATTCAGAAATTAT | 2166 | ATAATTTCTGAATATTTAGATGGAT |
| 903 | CATCCATCTAAATATTCAGAAATTA | 2167 | TAATTTCTGAATATTTAGATGGATG |
| 904 | CCATCCATCTAAATATTCAGAAATT | 2168 | AATTTCTGAATATTTAGATGGATGG |
| 905 | ACCATCCATCTAAATATTCAGAAAT | 2169 | ATTTCTGAATATTTAGATGGATGGT |
| 906 | AACCATCCATCTAAATATTCAGAAA | 2170 | TTTCTGAATATTTAGATGGATGGTT |
| 907 | CAACCATCCATCTAAATATTCAGAA | 2171 | TTCTGAATATTTAGATGGATGGTTG |
| 908 | ACAACCATCCATCTAAATATTCAGA | 2172 | TCTGAATATTTAGATGGATGGTTGT |
| 909 | CACAACCATCCATCTAAATATTCAG | 2173 | CTGAATATTTAGATGGATGGTTGTG |
| 910 | TCACAACCATCCATCTAAATATTCA | 2174 | TGAATATTTAGATGGATGGTTGTGA |
| 911 | CTCACAACCATCCATCTAAATATTC | 2175 | GAATATTTAGATGGATGGTTGTGAG |
| 912 | ACTCACAACCATCCATCTAAATATT | 2176 | AATATTTAGATGGATGGTTGTGAGT |
| 913 | CACTCACAACCATCCATCTAAATAT | 2177 | ATATTTAGATGGATGGTTGTGAGTG |
| 914 | CCACTCACAACCATCCATCTAAATA | 2178 | TATTTAGATGGATGGTTGTGAGTGG |
| 915 | GCCACTCACAACCATCCATCTAAAT | 2179 | ATTTAGATGGATGGTTGTGAGTGGC |
| 916 | AGCCACTCACAACCATCCATCTAAA | 2180 | TTTAGATGGATGGTTGTGAGTGGCT |
| 917 | CAGCCACTCACAACCATCCATCTAA | 2181 | TTAGATGGATGGTTGTGAGTGGCTG |
| 918 | CCAGCCACTCACAACCATCCATCTA | 2182 | TAGATGGATGGTTGTGAGTGGCTGG |
| 919 | ACCAGCCACTCACAACCATCCATCT | 2183 | AGATGGATGGTTGTGAGTGGCTGGT |
| 920 | CACCAGCCACTCACAACCATCCATC | 2184 | GATGGATGGTTGTGAGTGGCTGGTG |
| 921 | CCACCAGCCACTCACAACCATCCAT | 2185 | ATGGATGGTTGTGAGTGGCTGGTGG |
| 922 | TCCACCAGCCACTCACAACCATCCA | 2186 | TGGATGGTTGTGAGTGGCTGGTGGA |
| 923 | GTCCACCAGCCACTCACAACCATCC | 2187 | GGATGGTTGTGAGTGGCTGGTGGAC |
| 924 | TGTCCACCAGCCACTCACAACCATC | 2188 | GATGGTTGTGAGTGGCTGGTGGACA |
| 925 | CTGTCCACCAGCCACTCACAACCAT | 2189 | ATGGTTGTGAGTGGCTGGTGGACAG |
| 926 | TCTGTCCACCAGCCACTCACAACCA | 2190 | TGGTTGTGAGTGGCTGGTGGACAGA |
| 927 | GTCTGTCCACCAGCCACTCACAACC | 2191 | GGTTGTGAGTGGCTGGTGGACAGAC |
| 928 | CGTCTGTCCACCAGCCACTCACAAC | 2192 | GTTGTGAGTGGCTGGTGGACAGACG |
| 929 | TCGTCTGTCCACCAGCCACTCACAA | 2193 | TTGTGAGTGGCTGGTGGACAGACGA |
| 930 | TTCGTCTGTCCACCAGCCACTCACA | 2194 | TGTGAGTGGCTGGTGGACAGACGAA |
| 931 | TTTCGTCTGTCCACCAGCCACTCAC | 2195 | GTGAGTGGCTGGTGGACAGACGAAA |
| 932 | TTTTCGTCTGTCCACCAGCCACTCA | 2196 | TGAGTGGCTGGTGGACAGACGAAAA |
| 933 | TTTTTCGTCTGTCCACCAGCCACTC | 2197 | GAGTGGCTGGTGGACAGACGAAAAA |
| 934 | ATTTTTCGTCTGTCCACCAGCCACT | 2198 | AGTGGCTGGTGGACAGACGAAAAAT |
| 935 | CATTTTTCGTCTGTCCACCAGCCAC | 2199 | GTGGCTGGTGGACAGACGAAAAATG |
| 936 | CCATTTTTCGTCTGTCCACCAGCCA | 2200 | TGGCTGGTGGACAGACGAAAAATGG |
| 937 | TCCATTTTTCGTCTGTCCACCAGCC | 2201 | GGCTGGTGGACAGACGAAAAATGGA |
| 938 | ATCCATTTTTCGTCTGTCCACCAGC | 2202 | GCTGGTGGACAGACGAAAAATGGAT |
| 939 | CATCCATTTTTCGTCTGTCCACCAG | 2203 | CTGGTGGACAGACGAAAAATGGATG |
| 940 | CCATCCATTTTTCGTCTGTCCACCA | 2204 | TGGTGGACAGACGAAAAATGGATGG |
| 941 | ACCATCCATTTTTCGTCTGTCCACC | 2205 | GGTGGACAGACGAAAAATGGATGGT |
| 942 | AACCATCCATTTTTCGTCTGTCCAC | 2206 | GTGGACAGACGAAAAATGGATGGTT |
| 943 | CAACCATCCATTTTTCGTCTGTCCA | 2207 | TGGACAGACGAAAAATGGATGGTTG |
| 944 | CCAACCATCCATTTTTCGTCTGTCC | 2208 | GGACAGACGAAAAATGGATGGTTGG |
| 945 | TCCAACCATCCATTTTTCGTCTGTC | 2209 | GACAGACGAAAAATGGATGGTTGGA |
| 946 | ATCCAACCATCCATTTTTCGTCTGT | 2210 | ACAGACGAAAAATGGATGGTTGGAT |
| 947 | TATCCAACCATCCATTTTTCGTCTG | 2211 | CAGACGAAAAATGGATGGTTGGATA |
| 948 | TTATCCAACCATCCATTTTTCGTCT | 2212 | AGACGAAAAATGGATGGTTGGATAA |
| 949 | TTTATCCAACCATCCATTTTTCGTC | 2213 | GACGAAAAATGGATGGTTGGATAAA |
| 950 | ATTTATCCAACCATCCATTTTTCGT | 2214 | ACGAAAAATGGATGGTTGGATAAAT |
| 951 | AATTTATCCAACCATCCATTTTTCG | 2215 | CGAAAAATGGATGGTTGGATAAATT |
| 952 | CAATTTATCCAACCATCCATTTTTC | 2216 | GAAAAATGGATGGTTGGATAAATTG |
| 953 | TCAATTTATCCAACCATCCATTTTT | 2217 | AAAAATGGATGGTTGGATAAATTGA |
| 954 | ATCAATTTATCCAACCATCCATTTT | 2218 | AAAATGGATGGTTGGATAAATTGAT |
| 955 | CATCAATTTATCCAACCATCCATTT | 2219 | AAATGGATGGTTGGATAAATTGATG |
| 956 | CCATCAATTTATCCAACCATCCATT | 2220 | AATGGATGGTTGGATAAATTGATGG |
| 957 | CCCATCAATTTATCCAACCATCCAT | 2221 | ATGGATGGTTGGATAAATTGATGGG |
| 958 | ACCCATCAATTTATCCAACCATCCA | 2222 | TGGATGGTTGGATAAATTGATGGGT |
| 959 | CACCCATCAATTTATCCAACCATCC | 2223 | GGATGGTTGGATAAATTGATGGGTG |
| 960 | CCACCCATCAATTTATCCAACCATC | 2224 | GATGGTTGGATAAATTGATGGGTGG |
| 961 | TCCACCCATCAATTTATCCAACCAT | 2225 | ATGGTTGGATAAATTGATGGGTGGA |
| 962 | ATCCACCCATCAATTTATCCAACCA | 2226 | TGGTTGGATAAATTGATGGGTGGAT |
| 963 | CATCCACCCATCAATTTATCCAACC | 2227 | GGTTGGATAAATTGATGGGTGGATG |
| 964 | CCATCCACCCATCAATTTATCCAAC | 2228 | GTTGGATAAATTGATGGGTGGATGG |
| 965 | TCCATCCACCCATCAATTTATCCAA | 2229 | TTGGATAAATTGATGGGTGGATGGA |
| 966 | ATCCATCCACCCATCAATTTATCCA | 2230 | TGGATAAATTGATGGGTGGATGGAT |
| 967 | CATCCATCCACCCATCAATTTATCC | 2231 | GGATAAATTGATGGGTGGATGGATG |
| 968 | CCATCCATCCACCCATCAATTTATC | 2232 | GATAAATTGATGGGTGGATGGATGG |
| 969 | ACCATCCATCCACCCATCAATTTAT | 2233 | ATAAATTGATGGGTGGATGGATGGT |
| 970 | AACCATCCATCCACCCATCAATTTA | 2234 | TAAATTGATGGGTGGATGGATGGTT |
| 971 | CAACCATCCATCCACCCATCAATTT | 2235 | AAATTGATGGGTGGATGGATGGTTG |
| 972 | CCAACCATCCATCCACCCATCAATT | 2236 | AATTGATGGGTGGATGGATGGTTGG |
| 973 | ACCAACCATCCATCCACCCATCAAT | 2237 | ATTGATGGGTGGATGGATGGTTGGT |
| 974 | AACCAACCATCCATCCACCCATCAA | 2238 | TTGATGGGTGGATGGATGGTTGGTT |
| 975 | CAACCAACCATCCATCCACCCATCA | 2239 | TGATGGGTGGATGGATGGTTGGTTG |
| 976 | ACAACCAACCATCCATCCACCCATC | 2240 | GATGGGTGGATGGATGGTTGGTTGT |
| 977 | TACAACCAACCATCCATCCACCCAT | 2241 | ATGGGTGGATGGATGGTTGGTTGTA |
| 978 | ATACAACCAACCATCCATCCACCCA | 2242 | TGGGTGGATGGATGGTTGGTTGTAT |
| 979 | CATACAACCAACCATCCATCCACCC | 2243 | GGGTGGATGGATGGTTGGTTGTATG |
| 980 | TCATACAACCAACCATCCATCCACC | 2244 | GGTGGATGGATGGTTGGTTGTATGA |
| 981 | TTCATACAACCAACCATCCATCCAC | 2245 | GTGGATGGATGGTTGGTTGTATGAA |
| 982 | TTTCATACAACCAACCATCCATCCA | 2246 | TGGATGGATGGTTGGTTGTATGAAA |
| 983 | CTTTCATACAACCAACCATCCATCC | 2247 | GGATGGATGGTTGGTTGTATGAAAG |
| 984 | TCTTTCATACAACCAACCATCCATC | 2248 | GATGGATGGTTGGTTGTATGAAAGA |
| 985 | TTCTTTCATACAACCAACCATCCAT | 2249 | ATGGATGGTTGGTTGTATGAAAGAA |
| 986 | ATTCTTTCATACAACCAACCATCCA | 2250 | TGGATGGTTGGTTGTATGAAAGAAT |
| 987 | CATTCTTTCATACAACCAACCATCC | 2251 | GGATGGTTGGTTGTATGAAAGAATG |
| 988 | TCATTCTTTCATACAACCAACCATC | 2252 | GATGGTTGGTTGTATGAAAGAATGA |
| 989 | TTCATTCTTTCATACAACCAACCAT | 2253 | ATGGTTGGTTGTATGAAAGAATGAA |
| 990 | ATTCATTCTTTCATACAACCAACCA | 2254 | TGGTTGGTTGTATGAAAGAATGAAT |
| 991 | CATTCATTCTTTCATACAACCAACC | 2255 | GGTTGGTTGTATGAAAGAATGAATG |
| 992 | TCATTCATTCTTTCATACAACCAAC | 2256 | GTTGGTTGTATGAAAGAATGAATGA |
| 993 | ATCATTCATTCTTTCATACAACCAA | 2257 | TTGGTTGTATGAAAGAATGAATGAT |
| 994 | AATCATTCATTCTTTCATACAACCA | 2258 | TGGTTGTATGAAAGAATGAATGATT |
| 995 | CAATCATTCATTCTTTCATACAACC | 2259 | GGTTGTATGAAAGAATGAATGATTG |
| 996 | CCAATCATTCATTCTTTCATACAAC | 2260 | GTTGTATGAAAGAATGAATGATTGG |
| 997 | CCCAATCATTCATTCTTTCATACAA | 2261 | TTGTATGAAAGAATGAATGATTGGG |
| 998 | ACCCAATCATTCATTCTTTCATACA | 2262 | TGTATGAAAGAATGAATGATTGGGT |
| 999 | TACCCAATCATTCATTCTTTCATAC | 2263 | GTATGAAAGAATGAATGATTGGGTA |
| 1000 | CTACCCAATCATTCATTCTTTCATA | 2264 | TATGAAAGAATGAATGATTGGGTAG |
| 1001 | CCTACCCAATCATTCATTCTTTCAT | 2265 | ATGAAAGAATGAATGATTGGGTAGG |
| 1002 | ACCTACCCAATCATTCATTCTTTCA | 2266 | TGAAAGAATGAATGATTGGGTAGGT |
| 1003 | CACCTACCCAATCATTCATTCTTTC | 2267 | GAAAGAATGAATGATTGGGTAGGTG |
| 1004 | CCACCTACCCAATCATTCATTCTTT | 2268 | AAAGAATGAATGATTGGGTAGGTGG |
| 1005 | TCCACCTACCCAATCATTCATTCTT | 2269 | AAGAATGAATGATTGGGTAGGTGGA |
| 1006 | ATCCACCTACCCAATCATTCATTCT | 2270 | AGAATGAATGATTGGGTAGGTGGAT |
| 1007 | AATCCACCTACCCAATCATTCATTC | 2271 | GAATGAATGATTGGGTAGGTGGATT |
| 1008 | TAATCCACCTACCCAATCATTCATT | 2272 | AATGAATGATTGGGTAGGTGGATTA |
| 1009 | TTAATCCACCTACCCAATCATTCAT | 2273 | ATGAATGATTGGGTAGGTGGATTAA |
| 1010 | CTTAATCCACCTACCCAATCATTCA | 2274 | TGAATGATTGGGTAGGTGGATTAAG |
| 1011 | ACTTAATCCACCTACCCAATCATTC | 2275 | GAATGATTGGGTAGGTGGATTAAGT |
| 1012 | AACTTAATCCACCTACCCAATCATT | 2276 | AATGATTGGGTAGGTGGATTAAGTT |
| 1013 | CAACTTAATCCACCTACCCAATCAT | 2277 | ATGATTGGGTAGGTGGATTAAGTTG |
| 1014 | GCAACTTAATCCACCTACCCAATCA | 2278 | TGATTGGGTAGGTGGATTAAGTTGC |
| 1015 | CGCAACTTAATCCACCTACCCAATC | 2279 | GATTGGGTAGGTGGATTAAGTTGCG |
| 1016 | CCGCAACTTAATCCACCTACCCAAT | 2280 | ATTGGGTAGGTGGATTAAGTTGCGG |
| 1017 | TCCGCAACTTAATCCACCTACCCAA | 2281 | TTGGGTAGGTGGATTAAGTTGCGGA |
| 1018 | ATCCGCAACTTAATCCACCTACCCA | 2282 | TGGGTAGGTGGATTAAGTTGCGGAT |
| 1019 | GATCCGCAACTTAATCCACCTACCC | 2283 | GGGTAGGTGGATTAAGTTGCGGATC |
| 1020 | TGATCCGCAACTTAATCCACCTACC | 2284 | GGTAGGTGGATTAAGTTGCGGATCA |
| 1021 | TTGATCCGCAACTTAATCCACCTAC | 2285 | GTAGGTGGATTAAGTTGCGGATCAA |
| 1022 | ATTGATCCGCAACTTAATCCACCTA | 2286 | TAGGTGGATTAAGTTGCGGATCAAT |
| 1023 | CATTGATCCGCAACTTAATCCACCT | 2287 | AGGTGGATTAAGTTGCGGATCAATG |
| 1024 | ACATTGATCCGCAACTTAATCCACC | 2288 | GGTGGATTAAGTTGCGGATCAATGT |
| 1025 | TACATTGATCCGCAACTTAATCCAC | 2289 | GTGGATTAAGTTGCGGATCAATGTA |
| 1026 | ATACATTGATCCGCAACTTAATCCA | 2290 | TGGATTAAGTTGCGGATCAATGTAT |
| 1027 | CATACATTGATCCGCAACTTAATCC | 2291 | GGATTAAGTTGCGGATCAATGTATG |
| 1028 | CCATACATTGATCCGCAACTTAATC | 2292 | GATTAAGTTGCGGATCAATGTATGG |
| 1029 | CCCATACATTGATCCGCAACTTAAT | 2293 | ATTAAGTTGCGGATCAATGTATGGG |
| 1030 | TCCCATACATTGATCCGCAACTTAA | 2294 | TTAAGTTGCGGATCAATGTATGGGA |
| 1031 | ATCCCATACATTGATCCGCAACTTA | 2295 | TAAGTTGCGGATCAATGTATGGGAT |
| 1032 | CATCCCATACATTGATCCGCAACTT | 2296 | AAGTTGCGGATCAATGTATGGGATG |
| 1033 | CCATCCCATACATTGATCCGCAACT | 2297 | AGTTGCGGATCAATGTATGGGATGG |
| 1034 | TCCATCCCATACATTGATCCGCAAC | 2298 | GTTGCGGATCAATGTATGGGATGGA |
| 1035 | ATCCATCCCATACATTGATCCGCAA | 2299 | TTGCGGATCAATGTATGGGATGGAT |
| 1036 | CATCCATCCCATACATTGATCCGCA | 2300 | TGCGGATCAATGTATGGGATGGATG |
| 1037 | TCATCCATCCCATACATTGATCCGC | 2301 | GCGGATCAATGTATGGGATGGATGA |
| 1038 | TTCATCCATCCCATACATTGATCCG | 2302 | CGGATCAATGTATGGGATGGATGAA |
| 1039 | ATTCATCCATCCCATACATTGATCC | 2303 | GGATCAATGTATGGGATGGATGAAT |
| 1040 | CATTCATCCATCCCATACATTGATC | 2304 | GATCAATGTATGGGATGGATGAATG |
| 1041 | CCATTCATCCATCCCATACATTGAT | 2305 | ATCAATGTATGGGATGGATGAATGG |
| 1042 | TCCATTCATCCATCCCATACATTGA | 2306 | TCAATGTATGGGATGGATGAATGGA |
| 1043 | ATCCATTCATCCATCCCATACATTG | 2307 | CAATGTATGGGATGGATGAATGGAT |
| 1044 | CATCCATTCATCCATCCCATACATT | 2308 | AATGTATGGGATGGATGAATGGATG |
| 1045 | CCATCCATTCATCCATCCCATACAT | 2309 | ATGTATGGGATGGATGAATGGATGG |
| 1046 | TCCATCCATTCATCCATCCCATACA | 2310 | TGTATGGGATGGATGAATGGATGGA |
| 1047 | ATCCATCCATTCATCCATCCCATAC | 2311 | GTATGGGATGGATGAATGGATGGAT |
| 1048 | CATCCATCCATTCATCCATCCCATA | 2312 | TATGGGATGGATGAATGGATGGATG |
| 1049 | CCATCCATCCATTCATCCATCCCAT | 2313 | ATGGGATGGATGAATGGATGGATGG |
| 1050 | TCCATCCATCCATTCATCCATCCCA | 2314 | TGGGATGGATGAATGGATGGATGGA |
| 1051 | ATCCATCCATCCATTCATCCATCCC | 2315 | GGGATGGATGAATGGATGGATGGAT |
| 1052 | CATCCATCCATCCATTCATCCATCC | 2316 | GGATGGATGAATGGATGGATGGATG |
| 1053 | CCATCCATCCATCCATTCATCCATC | 2317 | GATGGATGAATGGATGGATGGATGG |
| 1054 | TCCATCCATCCATCCATTCATCCAT | 2318 | ATGGATGAATGGATGGATGGATGGA |
| 1055 | ATCCATCCATCCATCCATTCATCCA | 2319 | TGGATGAATGGATGGATGGATGGAT |
| 1056 | CATCCATCCATCCATCCATTCATCC | 2320 | GGATGAATGGATGGATGGATGGATG |
| 1057 | ACATCCATCCATCCATCCATTCATC | 2321 | GATGAATGGATGGATGGATGGATGT |
| 1058 | CACATCCATCCATCCATCCATTCAT | 2322 | ATGAATGGATGGATGGATGGATGTG |
| 1059 | ACACATCCATCCATCCATCCATTCA | 2323 | TGAATGGATGGATGGATGGATGTGT |
| 1060 | CACACATCCATCCATCCATCCATTC | 2324 | GAATGGATGGATGGATGGATGTGTG |
| 1061 | CCACACATCCATCCATCCATCCATT | 2325 | AATGGATGGATGGATGGATGTGTGG |
| 1062 | ACCACACATCCATCCATCCATCCAT | 2326 | ATGGATGGATGGATGGATGTGTGGT |
| 1063 | AACCACACATCCATCCATCCATCCA | 2327 | TGGATGGATGGATGGATGTGTGGTT |
| 1064 | CAACCACACATCCATCCATCCATCC | 2328 | GGATGGATGGATGGATGTGTGGTTG |
| 1065 | TCAACCACACATCCATCCATCCATC | 2329 | GATGGATGGATGGATGTGTGGTTGA |
| 1066 | TTCAACCACACATCCATCCATCCAT | 2330 | ATGGATGGATGGATGTGTGGTTGAA |
| 1067 | ATTCAACCACACATCCATCCATCCA | 2331 | TGGATGGATGGATGTGTGGTTGAAT |
| 1068 | AATTCAACCACACATCCATCCATCC | 2332 | GGATGGATGGATGTGTGGTTGAATT |
| 1069 | TAATTCAACCACACATCCATCCATC | 2333 | GATGGATGGATGTGTGGTTGAATTA |
| 1070 | GTAATTCAACCACACATCCATCCAT | 2334 | ATGGATGGATGTGTGGTTGAATTAC |
| 1071 | AGTAATTCAACCACACATCCATCCA | 2335 | TGGATGGATGTGTGGTTGAATTACT |
| 1072 | CAGTAATTCAACCACACATCCATCC | 2336 | GGATGGATGTGTGGTTGAATTACTG |
| 1073 | TCAGTAATTCAACCACACATCCATC | 2337 | GATGGATGTGTGGTTGAATTACTGA |
| 1074 | TTCAGTAATTCAACCACACATCCAT | 2338 | ATGGATGTGTGGTTGAATTACTGAA |
| 1075 | TTTCAGTAATTCAACCACACATCCA | 2339 | TGGATGTGTGGTTGAATTACTGAAA |
| 1076 | CTTTCAGTAATTCAACCACACATCC | 2340 | GGATGTGTGGTTGAATTACTGAAAG |
| 1077 | CCTTTCAGTAATTCAACCACACATC | 2341 | GATGTGTGGTTGAATTACTGAAAGG |
| 1078 | ACCTTTCAGTAATTCAACCACACAT | 2342 | ATGTGTGGTTGAATTACTGAAAGGT |
| 1079 | AACCTTTCAGTAATTCAACCACACA | 2343 | TGTGTGGTTGAATTACTGAAAGGTT |
| 1080 | CAACCTTTCAGTAATTCAACCACAC | 2344 | GTGTGGTTGAATTACTGAAAGGTTG |
| 1081 | CCAACCTTTCAGTAATTCAACCACA | 2345 | TGTGGTTGAATTACTGAAAGGTTGG |
| 1082 | TCCAACCTTTCAGTAATTCAACCAC | 2346 | GTGGTTGAATTACTGAAAGGTTGGA |
| 1083 | TTCCAACCTTTCAGTAATTCAACCA | 2347 | TGGTTGAATTACTGAAAGGTTGGAA |
| 1084 | CTTCCAACCTTTCAGTAATTCAACC | 2348 | GGTTGAATTACTGAAAGGTTGGAAG |
| 1085 | TCTTCCAACCTTTCAGTAATTCAAC | 2349 | GTTGAATTACTGAAAGGTTGGAAGA |
| 1086 | CTCTTCCAACCTTTCAGTAATTCAA | 2350 | TTGAATTACTGAAAGGTTGGAAGAG |
| 1087 | ACTCTTCCAACCTTTCAGTAATTCA | 2351 | TGAATTACTGAAAGGTTGGAAGAGT |
| 1088 | CACTCTTCCAACCTTTCAGTAATTC | 2352 | GAATTACTGAAAGGTTGGAAGAGTG |
| 1089 | CCACTCTTCCAACCTTTCAGTAATT | 2353 | AATTACTGAAAGGTTGGAAGAGTGG |
| 1090 | TCCACTCTTCCAACCTTTCAGTAAT | 2354 | ATTACTGAAAGGTTGGAAGAGTGGA |
| 1091 | ATCCACTCTTCCAACCTTTCAGTAA | 2355 | TTACTGAAAGGTTGGAAGAGTGGAT |
| 1092 | CATCCACTCTTCCAACCTTTCAGTA | 2356 | TACTGAAAGGTTGGAAGAGTGGATG |
| 1093 | CCATCCACTCTTCCAACCTTTCAGT | 2357 | ACTGAAAGGTTGGAAGAGTGGATGG |
| 1094 | CCCATCCACTCTTCCAACCTTTCAG | 2358 | CTGAAAGGTTGGAAGAGTGGATGGG |
| 1095 | ACCCATCCACTCTTCCAACCTTTCA | 2359 | TGAAAGGTTGGAAGAGTGGATGGGT |
| 1096 | CACCCATCCACTCTTCCAACCTTTC | 2360 | GAAAGGTTGGAAGAGTGGATGGGTG |
| 1097 | TCACCCATCCACTCTTCCAACCTTT | 2361 | AAAGGTTGGAAGAGTGGATGGGTGA |
| 1098 | TTCACCCATCCACTCTTCCAACCTT | 2362 | AAGGTTGGAAGAGTGGATGGGTGAA |
| 1099 | TTTCACCCATCCACTCTTCCAACCT | 2363 | AGGTTGGAAGAGTGGATGGGTGAAA |
| 1100 | ATTTCACCCATCCACTCTTCCAACC | 2364 | GGTTGGAAGAGTGGATGGGTGAAAT |
| 1101 | AATTTCACCCATCCACTCTTCCAAC | 2365 | GTTGGAAGAGTGGATGGGTGAAATT |
| 1102 | AAATTTCACCCATCCACTCTTCCAA | 2366 | TTGGAAGAGTGGATGGGTGAAATTT |
| 1103 | CAAATTTCACCCATCCACTCTTCCA | 2367 | TGGAAGAGTGGATGGGTGAAATTTG |
| 1104 | CCAAATTTCACCCATCCACTCTTCC | 2368 | GGAAGAGTGGATGGGTGAAATTTGG |
| 1105 | CCCAAATTTCACCCATCCACTCTTC | 2369 | GAAGAGTGGATGGGTGAAATTTGGG |
| 1106 | CCCCAAATTTCACCCATCCACTCTT | 2370 | AAGAGTGGATGGGTGAAATTTGGGG |
| 1107 | ACCCCAAATTTCACCCATCCACTCT | 2371 | AGAGTGGATGGGTGAAATTTGGGGT |
| 1108 | TACCCCAAATTTCACCCATCCACTC | 2372 | GAGTGGATGGGTGAAATTTGGGGTA |
| 1109 | CTACCCCAAATTTCACCCATCCACT | 2373 | AGTGGATGGGTGAAATTTGGGGTAG |
| 1110 | ACTACCCCAAATTTCACCCATCCAC | 2374 | GTGGATGGGTGAAATTTGGGGTAGT |
| 1111 | AACTACCCCAAATTTCACCCATCCA | 2375 | TGGATGGGTGAAATTTGGGGTAGTT |
| 1112 | TAACTACCCCAAATTTCACCCATCC | 2376 | GGATGGGTGAAATTTGGGGTAGTTA |
| 1113 | CTAACTACCCCAAATTTCACCCATC | 2377 | GATGGGTGAAATTTGGGGTAGTTAG |
| 1114 | TCTAACTACCCCAAATTTCACCCAT | 2378 | ATGGGTGAAATTTGGGGTAGTTAGA |
| 1115 | ATCTAACTACCCCAAATTTCACCCA | 2379 | TGGGTGAAATTTGGGGTAGTTAGAT |
| 1116 | CATCTAACTACCCCAAATTTCACCC | 2380 | GGGTGAAATTTGGGGTAGTTAGATG |
| 1117 | CCATCTAACTACCCCAAATTTCACC | 2381 | GGTGAAATTTGGGGTAGTTAGATGG |
| 1118 | CCCATCTAACTACCCCAAATTTCAC | 2382 | GTGAAATTTGGGGTAGTTAGATGGG |
| 1119 | ACCCATCTAACTACCCCAAATTTCA | 2383 | TGAAATTTGGGGTAGTTAGATGGGT |
| 1120 | CACCCATCTAACTACCCCAAATTTC | 2384 | GAAATTTGGGGTAGTTAGATGGGTG |
| 1121 | CCACCCATCTAACTACCCCAAATTT | 2385 | AAATTTGGGGTAGTTAGATGGGTGG |
| 1122 | CCCACCCATCTAACTACCCCAAATT | 2386 | AATTTGGGGTAGTTAGATGGGTGGG |
| 1123 | ACCCACCCATCTAACTACCCCAAAT | 2387 | ATTTGGGGTAGTTAGATGGGTGGGT |
| 1124 | CACCCACCCATCTAACTACCCCAAA | 2388 | TTTGGGGTAGTTAGATGGGTGGGTG |
| 1125 | ACACCCACCCATCTAACTACCCCAA | 2389 | TTGGGGTAGTTAGATGGGTGGGTGT |
| 1126 | CACACCCACCCATCTAACTACCCCA | 2390 | TGGGGTAGTTAGATGGGTGGGTGTG |
| 1127 | ACACACCCACCCATCTAACTACCCC | 2391 | GGGGTAGTTAGATGGGTGGGTGTGT |
| 1128 | CACACACCCACCCATCTAACTACCC | 2392 | GGGTAGTTAGATGGGTGGGTGTGTG |
| 1129 | CCACACACCCACCCATCTAACTACC | 2393 | GGTAGTTAGATGGGTGGGTGTGTGG |
| 1130 | TCCACACACCCACCCATCTAACTAC | 2394 | GTAGTTAGATGGGTGGGTGTGTGGA |
| 1131 | ATCCACACACCCACCCATCTAACTA | 2395 | TAGTTAGATGGGTGGGTGTGTGGAT |
| 1132 | CATCCACACACCCACCCATCTAACT | 2396 | AGTTAGATGGGTGGGTGTGTGGATG |
| 1133 | CCATCCACACACCCACCCATCTAAC | 2397 | GTTAGATGGGTGGGTGTGTGGATGG |
| 1134 | TCCATCCACACACCCACCCATCTAA | 2398 | TTAGATGGGTGGGTGTGTGGATGGA |
| 1135 | ATCCATCCACACACCCACCCATCTA | 2399 | TAGATGGGTGGGTGTGTGGATGGAT |
| 1136 | TATCCATCCACACACCCACCCATCT | 2400 | AGATGGGTGGGTGTGTGGATGGATA |
| 1137 | TTATCCATCCACACACCCACCCATC | 2401 | GATGGGTGGGTGTGTGGATGGATAA |
| 1138 | TTTATCCATCCACACACCCACCCAT | 2402 | ATGGGTGGGTGTGTGGATGGATAAA |
| 1139 | TTTTATCCATCCACACACCCACCCA | 2403 | TGGGTGGGTGTGTGGATGGATAAAA |
| 1140 | CTTTTATCCATCCACACACCCACCC | 2404 | GGGTGGGTGTGTGGATGGATAAAAG |
| 1141 | TCTTTTATCCATCCACACACCCACC | 2405 | GGTGGGTGTGTGGATGGATAAAAGA |
| 1142 | CTCTTTTATCCATCCACACACCCAC | 2406 | GTGGGTGTGTGGATGGATAAAAGAG |
| 1143 | ACTCTTTTATCCATCCACACACCCA | 2407 | TGGGTGTGTGGATGGATAAAAGAGT |
| 1144 | TACTCTTTTATCCATCCACACACCC | 2408 | GGGTGTGTGGATGGATAAAAGAGTA |
| 1145 | CTACTCTTTTATCCATCCACACACC | 2409 | GGTGTGTGGATGGATAAAAGAGTAG |
| 1146 | TCTACTCTTTTATCCATCCACACAC | 2410 | GTGTGTGGATGGATAAAAGAGTAGA |
| 1147 | ATCTACTCTTTTATCCATCCACACA | 2411 | TGTGTGGATGGATAAAAGAGTAGAT |
| 1148 | CATCTACTCTTTTATCCATCCACAC | 2412 | GTGTGGATGGATAAAAGAGTAGATG |
| 1149 | TCATCTACTCTTTTATCCATCCACA | 2413 | TGTGGATGGATAAAAGAGTAGATGA |
| 1150 | TTCATCTACTCTTTTATCCATCCAC | 2414 | GTGGATGGATAAAAGAGTAGATGAA |
| 1151 | ATTCATCTACTCTTTTATCCATCCA | 2415 | TGGATGGATAAAAGAGTAGATGAAT |
| 1152 | CATTCATCTACTCTTTTATCCATCC | 2416 | GGATGGATAAAAGAGTAGATGAATG |
| 1153 | TCATTCATCTACTCTTTTATCCATC | 2417 | GATGGATAAAAGAGTAGATGAATGA |
| 1154 | TTCATTCATCTACTCTTTTATCCAT | 2418 | ATGGATAAAAGAGTAGATGAATGAA |
| 1155 | ATTCATTCATCTACTCTTTTATCCA | 2419 | TGGATAAAAGAGTAGATGAATGAAT |
| 1156 | AATTCATTCATCTACTCTTTTATCC | 2420 | GGATAAAAGAGTAGATGAATGAATT |
| 1157 | TAATTCATTCATCTACTCTTTTATC | 2421 | GATAAAAGAGTAGATGAATGAATTA |
| 1158 | TTAATTCATTCATCTACTCTTTTAT | 2422 | ATAAAAGAGTAGATGAATGAATTAA |
| 1159 | ATTAATTCATTCATCTACTCTTTTA | 2423 | TAAAAGAGTAGATGAATGAATTAAT |
| 1160 | CATTAATTCATTCATCTACTCTTTT | 2424 | AAAAGAGTAGATGAATGAATTAATG |
| 1161 | TCATTAATTCATTCATCTACTCTTT | 2425 | AAAGAGTAGATGAATGAATTAATGA |
| 1162 | TTCATTAATTCATTCATCTACTCTT | 2426 | AAGAGTAGATGAATGAATTAATGAA |
| 1163 | ATTCATTAATTCATTCATCTACTCT | 2427 | AGAGTAGATGAATGAATTAATGAAT |
| 1164 | TATTCATTAATTCATTCATCTACTC | 2428 | GAGTAGATGAATGAATTAATGAATA |
| 1165 | TTATTCATTAATTCATTCATCTACT | 2429 | AGTAGATGAATGAATTAATGAATAA |
| 1166 | TTTATTCATTAATTCATTCATCTAC | 2430 | GTAGATGAATGAATTAATGAATAAA |
| 1167 | GTTTATTCATTAATTCATTCATCTA | 2431 | TAGATGAATGAATTAATGAATAAAC |
| 1168 | TGTTTATTCATTAATTCATTCATCT | 2432 | AGATGAATGAATTAATGAATAAACA |
| 1169 | CTGTTTATTCATTAATTCATTCATC | 2433 | GATGAATGAATTAATGAATAAACAG |
| 1170 | CCTGTTTATTCATTAATTCATTCAT | 2434 | ATGAATGAATTAATGAATAAACAGG |
| 1171 | GCCTGTTTATTCATTAATTCATTCA | 2435 | TGAATGAATTAATGAATAAACAGGC |
| 1172 | TGCCTGTTTATTCATTAATTCATTC | 2436 | GAATGAATTAATGAATAAACAGGCA |
| 1173 | CTGCCTGTTTATTCATTAATTCATT | 2437 | AATGAATTAATGAATAAACAGGCAG |
| 1174 | TCTGCCTGTTTATTCATTAATTCAT | 2438 | ATGAATTAATGAATAAACAGGCAGA |
| 1175 | ATCTGCCTGTTTATTCATTAATTCA | 2439 | TGAATTAATGAATAAACAGGCAGAT |
| 1176 | CATCTGCCTGTTTATTCATTAATTC | 2440 | GAATTAATGAATAAACAGGCAGATG |
| 1177 | CCATCTGCCTGTTTATTCATTAATT | 2441 | AATTAATGAATAAACAGGCAGATGG |
| 1178 | TCCATCTGCCTGTTTATTCATTAAT | 2442 | ATTAATGAATAAACAGGCAGATGGA |
| 1179 | ATCCATCTGCCTGTTTATTCATTAA | 2443 | TTAATGAATAAACAGGCAGATGGAT |
| 1180 | CATCCATCTGCCTGTTTATTCATTA | 2444 | TAATGAATAAACAGGCAGATGGATG |
| 1181 | TCATCCATCTGCCTGTTTATTCATT | 2445 | AATGAATAAACAGGCAGATGGATGA |
| 1182 | ATCATCCATCTGCCTGTTTATTCAT | 2446 | ATGAATAAACAGGCAGATGGATGAT |
| 1183 | CATCATCCATCTGCCTGTTTATTCA | 2447 | TGAATAAACAGGCAGATGGATGATG |
| 1184 | ACATCATCCATCTGCCTGTTTATTC | 2448 | GAATAAACAGGCAGATGGATGATGT |
| 1185 | TACATCATCCATCTGCCTGTTTATT | 2449 | AATAAACAGGCAGATGGATGATGTA |
| 1186 | TTACATCATCCATCTGCCTGTTTAT | 2450 | ATAAACAGGCAGATGGATGATGTAA |
| 1187 | CTTACATCATCCATCTGCCTGTTTA | 2451 | TAAACAGGCAGATGGATGATGTAAG |
| 1188 | GCTTACATCATCCATCTGCCTGTTT | 2452 | AAACAGGCAGATGGATGATGTAAGC |
| 1189 | AGCTTACATCATCCATCTGCCTGTT | 2453 | AACAGGCAGATGGATGATGTAAGCT |
| 1190 | CAGCTTACATCATCCATCTGCCTGT | 2454 | ACAGGCAGATGGATGATGTAAGCTG |
| 1191 | GCAGCTTACATCATCCATCTGCCTG | 2455 | CAGGCAGATGGATGATGTAAGCTGC |
| 1192 | GGCAGCTTACATCATCCATCTGCCT | 2456 | AGGCAGATGGATGATGTAAGCTGCC |
| 1193 | GGGCAGCTTACATCATCCATCTGCC | 2457 | GGCAGATGGATGATGTAAGCTGCCC |
| 1194 | GGGGCAGCTTACATCATCCATCTGC | 2458 | GCAGATGGATGATGTAAGCTGCCCC |
| 1195 | TGGGGCAGCTTACATCATCCATCTG | 2459 | CAGATGGATGATGTAAGCTGCCCCA |
| 1196 | CTGGGGCAGCTTACATCATCCATCT | 2460 | AGATGGATGATGTAAGCTGCCCCAG |
| 1197 | TCTGGGGCAGCTTACATCATCCATC | 2461 | GATGGATGATGTAAGCTGCCCCAGA |
| 1198 | GTCTGGGGCAGCTTACATCATCCAT | 2462 | ATGGATGATGTAAGCTGCCCCAGAC |
| 1199 | GGTCTGGGGCAGCTTACATCATCCA | 2463 | TGGATGATGTAAGCTGCCCCAGACC |
| 1200 | GGGTCTGGGGCAGCTTACATCATCC | 2464 | GGATGATGTAAGCTGCCCCAGACCC |
| 1201 | AGGGTCTGGGGCAGCTTACATCATC | 2465 | GATGATGTAAGCTGCCCCAGACCCT |
| 1202 | CAGGGTCTGGGGCAGCTTACATCAT | 2466 | ATGATGTAAGCTGCCCCAGACCCTG |
| 1203 | CCAGGGTCTGGGGCAGCTTACATCA | 2467 | TGATGTAAGCTGCCCCAGACCCTGG |
| 1204 | CCCAGGGTCTGGGGCAGCTTACATC | 2468 | GATGTAAGCTGCCCCAGACCCTGGG |
| 1205 | TCCCAGGGTCTGGGGCAGCTTACAT | 2469 | ATGTAAGCTGCCCCAGACCCTGGGA |
| 1206 | GTCCCAGGGTCTGGGGCAGCTTACA | 2470 | TGTAAGCTGCCCCAGACCCTGGGAC |
| 1207 | GGTCCCAGGGTCTGGGGCAGCTTAC | 2471 | GTAAGCTGCCCCAGACCCTGGGACC |
| 1208 | AGGTCCCAGGGTCTGGGGCAGCTTA | 2472 | TAAGCTGCCCCAGACCCTGGGACCT |
| 1209 | GAGGTCCCAGGGTCTGGGGCAGCTT | 2473 | AAGCTGCCCCAGACCCTGGGACCTC |
| 1210 | AGAGGTCCCAGGGTCTGGGGCAGCT | 2474 | AGCTGCCCCAGACCCTGGGACCTCT |
| 1211 | CAGAGGTCCCAGGGTCTGGGGCAGC | 2475 | GCTGCCCCAGACCCTGGGACCTCTG |
| 1212 | TCAGAGGTCCCAGGGTCTGGGGCAG | 2476 | CTGCCCCAGACCCTGGGACCTCTGA |
| 1213 | GTCAGAGGTCCCAGGGTCTGGGGCA | 2477 | TGCCCCAGACCCTGGGACCTCTGAC |
| 1214 | GGTCAGAGGTCCCAGGGTCTGGGGC | 2478 | GCCCCAGACCCTGGGACCTCTGACC |
| 1215 | GGGTCAGAGGTCCCAGGGTCTGGGG | 2479 | CCCCAGACCCTGGGACCTCTGACCC |
| 1216 | GGGGTCAGAGGTCCCAGGGTCTGGG | 2480 | CCCAGACCCTGGGACCTCTGACCCC |
| 1217 | GGGGGTCAGAGGTCCCAGGGTCTGG | 2481 | CCAGACCCTGGGACCTCTGACCCCC |
| 1218 | CGGGGGTCAGAGGTCCCAGGGTCTG | 2482 | CAGACCCTGGGACCTCTGACCCCCG |
| 1219 | CCGGGGGTCAGAGGTCCCAGGGTCT | 2483 | AGACCCTGGGACCTCTGACCCCCGG |
| 1220 | GCCGGGGGTCAGAGGTCCCAGGGTC | 2484 | GACCCTGGGACCTCTGACCCCCGGC |
| 1221 | CGCCGGGGGTCAGAGGTCCCAGGGT | 2485 | ACCCTGGGACCTCTGACCCCCGGCG |
| 1222 | TCGCCGGGGGTCAGAGGTCCCAGGG | 2486 | CCCTGGGACCTCTGACCCCCGGCGA |
| 1223 | GTCGCCGGGGGTCAGAGGTCCCAGG | 2487 | CCTGGGACCTCTGACCCCCGGCGAC |
| 1224 | GGTCGCCGGGGGTCAGAGGTCCCAG | 2488 | CTGGGACCTCTGACCCCCGGCGACC |
| 1225 | GGGTCGCCGGGGGTCAGAGGTCCCA | 2489 | TGGGACCTCTGACCCCCGGCGACCC |
| 1226 | GGGGTCGCCGGGGGTCAGAGGTCCC | 2490 | GGGACCTCTGACCCCCGGCGACCCC |
| 1227 | AGGGGTCGCCGGGGGTCAGAGGTCC | 2491 | GGACCTCTGACCCCCGGCGACCCCT |
| 1228 | AAGGGGTCGCCGGGGGTCAGAGGTC | 2492 | GACCTCTGACCCCCGGCGACCCCTT |
| 1229 | CAAGGGGTCGCCGGGGGTCAGAGGT | 2493 | ACCTCTGACCCCCGGCGACCCCTTG |
| 1230 | GCAAGGGGTCGCCGGGGGTCAGAGG | 2494 | CCTCTGACCCCCGGCGACCCCTTGC |
| 1231 | TGCAAGGGGTCGCCGGGGGTCAGAG | 2495 | CTCTGACCCCCGGCGACCCCTTGCA |
| 1232 | GTGCAAGGGGTCGCCGGGGGTCAGA | 2496 | TCTGACCCCCGGCGACCCCTTGCAC |
| 1233 | AGTGCAAGGGGTCGCCGGGGGTCAG | 2497 | CTGACCCCCGGCGACCCCTTGCACT |
| 1234 | GAGTGCAAGGGGTCGCCGGGGGTCA | 2498 | TGACCCCCGGCGACCCCTTGCACTC |
| 1235 | AGAGTGCAAGGGGTCGCCGGGGGTC | 2499 | GACCCCCGGCGACCCCTTGCACTCT |
| 1236 | GAGAGTGCAAGGGGTCGCCGGGGGT | 2500 | ACCCCCGGCGACCCCTTGCACTCTC |
| 1237 | GGAGAGTGCAAGGGGTCGCCGGGGG | 2501 | CCCCCGGCGACCCCTTGCACTCTCC |
| 1238 | TGGAGAGTGCAAGGGGTCGCCGGGG | 2502 | CCCCGGCGACCCCTTGCACTCTCCA |
| 1239 | ATGGAGAGTGCAAGGGGTCGCCGGG | 2503 | CCCGGCGACCCCTTGCACTCTCCAT |
| 1240 | CATGGAGAGTGCAAGGGGTCGCCGG | 2504 | CCGGCGACCCCTTGCACTCTCCATG |
| 1241 | TCATGGAGAGTGCAAGGGGTCGCCG | 2505 | CGGCGACCCCTTGCACTCTCCATGA |
| 1242 | GTCATGGAGAGTGCAAGGGGTCGCC | 2506 | GGCGACCCCTTGCACTCTCCATGAC |
| 1243 | TGTCATGGAGAGTGCAAGGGGTCGC | 2507 | GCGACCCCTTGCACTCTCCATGACA |
| 1244 | GTGTCATGGAGAGTGCAAGGGGTCG | 2508 | CGACCCCTTGCACTCTCCATGACAC |
| 1245 | AGTGTCATGGAGAGTGCAAGGGGTC | 2509 | GACCCCTTGCACTCTCCATGACACT |
| 1246 | AAGTGTCATGGAGAGTGCAAGGGGT | 2510 | ACCCCTTGCACTCTCCATGACACTT |
| 1247 | AAAGTGTCATGGAGAGTGCAAGGGG | 2511 | CCCCTTGCACTCTCCATGACACTTT |
| 1248 | GAAAGTGTCATGGAGAGTGCAAGGG | 2512 | CCCTTGCACTCTCCATGACACTTTC |
| 1249 | AGAAAGTGTCATGGAGAGTGCAAGG | 2513 | CCTTGCACTCTCCATGACACTTTCT |
| 1250 | GAGAAAGTGTCATGGAGAGTGCAAG | 2514 | CTTGCACTCTCCATGACACTTTCTC |
| 1251 | AGAGAAAGTGTCATGGAGAGTGCAA | 2515 | TTGCACTCTCCATGACACTTTCTCT |
| 1252 | GAGAGAAAGTGTCATGGAGAGTGCA | 2516 | TGCACTCTCCATGACACTTTCTCTC |
| 1253 | GGAGAGAAAGTGTCATGGAGAGTGC | 2517 | GCACTCTCCATGACACTTTCTCTCC |
| 1254 | GGGAGAGAAAGTGTCATGGAGAGTG | 2518 | CACTCTCCATGACACTTTCTCTCCC |
| 1255 | TGGGAGAGAAAGTGTCATGGAGAGT | 2519 | ACTCTCCATGACACTTTCTCTCCCA |
| 1256 | ATGGGAGAGAAAGTGTCATGGAGAG | 2520 | CTCTCCATGACACTTTCTCTCCCAT |
| 1257 | CATGGGAGAGAAAGTGTCATGGAGA | 2521 | TCTCCATGACACTTTCTCTCCCATG |
| 1258 | CCATGGGAGAGAAAGTGTCATGGAG | 2522 | CTCCATGACACTTTCTCTCCCATGG |
| 1259 | ACCATGGGAGAGAAAGTGTCATGGA | 2523 | TCCATGACACTTTCTCTCCCATGGT |
| 1260 | CACCATGGGAGAGAAAGTGTCATGG | 2524 | CCATGACACTTTCTCTCCCATGGTG |
| 1261 | CCACCATGGGAGAGAAAGTGTCATG | 2525 | CATGACACTTTCTCTCCCATGGTGG |
| 1262 | GCCACCATGGGAGAGAAAGTGTCAT | 2526 | ATGACACTTTCTCTCCCATGGTGGC |
| 1263 | TGCCACCATGGGAGAGAAAGTGTCA | 2527 | TGACACTTTCTCTCCCATGGTGGCA |
| 1264 | CTGCCACCATGGGAGAGAAAGTGTC | 2528 | GACACTTTCTCTCCCATGGTGGCAG |

*At least one (i.e., one or more) nucleoside linkage of the oligonucleotide sequence is independently selected from a phosphorothioate linkage, an alkyl phosphate linkage, a phosphorodithioate linkage, a phosphotriester linkage, an alkylphosphonate linkage, a 3-methoxypropyl phosphonate linkage, a methylphosphonate linkage, an aminoalkylphosphotriester linkage, an alkylene phosphonate linkage, a phosphinate linkage, a phosphoramidate linkage, a phosphoramidothioate linkage, a thiophosphorodiamidate linkage, a phosphorodiamidate (e.g., comprising a phosphorodiamidate morpholino (PMO), 3′ amino ribose, or 5′ amino ribose) linkage, an aminoalkylphosphoramidate linkage, a thiophosphoramidate linkage, a thionoalkylphosphonate linkage, a thionoalkylphosphotriester linkage, a thiophosphate linkage, a selenophosphate linkage, and a boranophosphate linkage.

### UNC13A Transcript

In various embodiments, an UNC13A mRNA transcript comprises the sequence
provided as SEQ ID NO: 5057.
GCCCCCGGTGCTGAACCAAGATGGCCGGTGGCGGCCGGGCCCCGGCGTGAGCCAAGCGCGGGCTGCAGCC
GGGAGATGCCCCAGCCCAGCGGCCGCTGAGCCCGACCCGACAGAGCCGGCCCGGCCGCCTCCGGCCCACC
TGCGAGCTCGGAGACATGTCTCTGCTTTGCGTTGGAGTCAAAAAAGCCAAGTTTGATGGTGCCCAAGAGA
AATTCAACACGTACGTGACCCTGAAAGTGCAGAATGTCAAGAGCACGACCATCGCGGTGCGGGGCAGCCA
GCCCAGCTGGGAGCAGGATTTCATGTTCGAGATTAACCGTCTGGATTTGGGACTGACGGTGGAGGTGTGG
AATAAGGGTCTCATCTGGGACACAATGGTGGGCACTGTGTGGATCCCACTGAGGACCATCCGCCAGTCCA
ATGAGGAGGGCCCTGGAGAGTGGCTGACGCTGGACTCCCAGGTCATCATGGCAGACAGTGAGATCTGTGG
CACCAAGGACCCCACCTTCCACCGCATCCTCCTGGACACGCGCTTTGAGCTACCCTTAGACATTCCTGAA
GAGGAGGCTCGCTACTGGGCCAAGAAGCTGGAGCAGCTCAATGCTATGCGGGACCAGGATGAATATTCGT
TCCAAGATGAGCAAGACAAGCCTCTGCCTGTCCCCAGCAACCAGTGCTGCAACTGGAATTATTTTGGCTG
GGGTGAGCAGCACAACGATGACCCCGACAGTGCAGTGGATGATCGTGACAGTGACTACCGCAGTGAAACG
AGCAACAGCATCCCGCCGCCCTATTATACTACGTCACAACCCAACGCCTCAGTCCACCAATATTCTGTTC
GCCCACCACCCCTGGGCTCCCGGGAGTCCTACAGTGACTCCATGCACAGTTACGAGGAGTTCTCTGAGCC
ACAAGCCCTCAGCCCCACGGGTAGCAGCCGCTATGCCTCTTCCGGGGAGCTGAGCCAGGGAAGCTCTCAG
CTGAGCGAGGACTTCGACCCTGACGAGCACAGCCTGCAGGGCTCCGACATGGAGGATGAGCGGGACCGGG
ACTCCTACCACTCCTGCCACAGCTCGGTCAGCTACCACAAAGACTCGCCTCGCTGGGACCAGGATGAGGA
AGAGCTGGAGGAGGACCTGGAGGACTTCCTGGAGGAGGAGGAGCTGCCTGAAGATGAGGAGGAGCTGGAG
GAGGAGGAGGAGGAGGTGCCTGACGATTTGGGCAGCTATGCCCAGCGTGAAGACGTAGCTGTGGCTGAGC
CCAAAGACTTCAAACGCATCAGCCTCCCGCCAGCTGCCCCAGGGAAGGAGGACAAGGCCCCAGTGGCACC
CACCGAGGCCCCCGACATGGCCAAGGTGGCCCCCAAGCCAGCCACGCCCGACAAGGTGCCTGCAGCTGAG
CAGATCCCTGAGGCTGAGCCACCCAAGGACGAGGAGAGTTTCAGGCCGAGAGAGGATGAGGAAGGCCAGG
AGGGGCAGGACTCCATGTCCAGGGCCAAGGCCAACTGGCTGCGTGCCTTCAACAAGGTGCGGATGCAGCT
GCAGGAGGCCCGGGGAGAAGGAGAGATGTCTAAATCCCTATGGTTCAAAGGCGGCCCAGGGGGCGGTCTC
ATCATCATCGACAGCATGCCAGACATCCGCAAGAGGAAACCTATCCCACTCGTGAGCGACTTGGCCATGT
CCCTGGTCCAGTCCAGGAAAGCGGGCATCACCTCGGCCTTGGCCTCCAGCACGTTGAACAACGAGGAGCT
GAAAAACCACGTTTACAAGAAGACCCTGCAAGCCTTAATCTACCCCATCTCGTGCACGACGCCACACAAC
TTCGAAGTGTGGACGGCCACCACGCCCACCTACTGCTACGAGTGCGAGGGGCTGCTGTGGGGCATCGCGA
GGCAGGGCATGCGCTGCACCGAGTGCGGTGTCAAGTGCCACGAGAAGTGCCAGGACCTGCTCAACGCCGA
CTGCCTGCAGCGGGCTGCGGAGAAGAGCTCCAAGCACGGGGCGGAGGACCGGACACAGAACATCATCATG
GTGCTCAAGGACCGCATGAAGATCCGGGAGCGCAACAAGCCCGAGATCTTCGAGCTCATCCAGGAGATCT
TCGCGGTGACCAAGACGGCGCACACGCAGCAGATGAAGGCGGTCAAGCAGAGCGTGCTGGACGGCACGTC
CAAGTGGTCCGCCAAGATCAGCATCACCGTGGTCTGCGCCCAGGGCTTGCAGGCAAAGGACAAGACAGGA
TCCAGTGACCCCTATGTCACCGTCCAGGTCGGGAAGACCAAGAAACGGACAAAAACCATCTATGGGAACC
TCAACCCGGTGTGGGAGGAGAATTTCCACTTTGAATGTCACAATTCCTCCGACCGCATCAAGGTGCGCGT
CTGGGACGAGGATGACGACATCAAATCCCGCGTGAAACAGAGGTTCAAGAGGGAATCTGACGATTTCCTG
GGGCAGACGATCATTGAGGTGCGGACGCTCAGCGGCGAGATGGACGTGTGGTACAACCTGGACAAGCGAA
CTGACAAATCTGCCGTGTCGGGTGCCATCCGGCTCCACATCAGTGTGGAGATCAAAGGCGAGGAGAAGGT
GGCCCCGTACCATGTCCAGTACACCTGTCTGCATGAGAACCTGTTCCACTTCGTGACCGACGTGCAGAAC
AATGGGGTCGTGAAGATCCCAGATGCCAAGGGTGACGATGCCTGGAAGGTTTACTACGATGAGACAGCCC
AGGAGATTGTGGACGAGTTTGCCATGCGCTACGGCGTCGAGTCCATCTACCAAGCCATGACCCACTTTGC
CTGCCTCTCCTCCAAGTATATGTGCCCAGGGGTGCCTGCCGTCATGAGCACCCTGCTCGCCAACATCAAT
GCCTACTACGCACACACCACCGCCTCCACCAACGTGTCTGCCTCCGACCGCTTCGCCGCCTCCAACTTTG
GGAAAGAGCGCTTCGTGAAACTCCTGGACCAGCTGCATAACTCCCTGCGGATTGACCTCTCCATGTACCG
GAATAACTTCCCAGCCAGCAGCCCGGAGAGACTCCAGGACCTCAAATCCACTGTGGACCTTCTCACCAGC
ATCACCTTCTTTCGGATGAAGGTACAAGAACTCCAGAGCCCGCCCCGAGCCAGCCAGGTGGTAAAGGACT
GTGTGAAAGCCTGCCTTAATTCTACCTACGAGTACATCTTCAATAACTGCCATGAACTGTACAGCCGGGA
GTACCAGACAGACCCGGCCAAGAAGGGGGAAGTTCTCCCAGAGGAACAGGGGCCCAGCATCAAGAACCTC
GACTTCTGGTCCAAGCTGATTACCCTCATAGTGTCCATCATTGAGGAAGACAAGAATTCCTACACTCCCT
GCCTCAACCAGTTTCCCCAGGAGCTGAATGTGGGTAAAATCAGCGCTGAAGTGATGTGGAATCTGTTTGC
CCAAGACATGAAGTACGCCATGGAGGAGCACGACAAGCATCGTCTATGCAAGAGTGCCGACTACATGAAC
CTCCACTTCAAGGTGAAATGGCTCTACAATGAGTATGTGACGGAACTTCCCGCCTTCAAGGACCGCGTGC
CTGAGTACCCTGCATGGTTTGAACCCTTCGTCATCCAGTGGCTGGATGAGAATGAGGAGGTGTCCCGGGA
TTTCCTGCACGGTGCCCTGGAGCGAGACAAGAAGGATGGGTTCCAGCAGACCTCAGAGCATGCCCTATTC
TCCTGCTCCGTGGTGGATGTTTTCTCCCAACTCAACCAGAGCTTTGAAATCATCAAGAAACTCGAGTGTC
CCGACCCTCAGATCGTGGGGCACTACATGAGGCGCTTTGCCAAGACCATCAGTAATGTGCTCCTCCAGTA
TGCAGACATCATCTCCAAGGACTTTGCCTCCTACTGCTCCAAGGAGAAGGAGAAAGTGCCCTGCATTCTC
ATGAATAACACTCAACAGCTACGAGTTCAGCTGGAGAAGATGTTCGAAGCCATGGGAGGAAAGGAGCTGG
ATGCTGAAGCCAGTGACATCCTGAAGGAGCTTCAGGTGAAACTCAATAACGTCTTGGATGAGCTCAGCCG
GGTGTTTGCTACCAGCTTCCAGCCGCACATTGAAGAGTGTGTCAAACAGATGGGTGACATCCTTAGCCAG
GTTAAGGGCACAGGCAATGTGCCAGCCAGTGCCTGCAGCAGCGTGGCCCAGGACGCGGACAATGTGTTGC
AGCCCATCATGGACCTGCTGGACAGCAACCTGACCCTCTTTGCCAAAATCTGTGAGAAGACTGTGCTGAA
GCGAGTGCTGAAGGAGCTGTGGAAGCTGGTTATGAACACCATGGAGAAAACCATCGTCCTGCCGCCCCTC
ACTGACCAGACGATGATCGGGAACCTCTTGAGAAAACATGGCAAGGGATTAGAAAAGGGCAGGGTGAAAT
TGCCAAGCCACTCAGACGGAACCCAGATGATCTTCAATGCAGCCAAGGAGCTGGGTCAGCTGTCCAAACT
CAAGGATCACATGGTACGAGAAGAAGCCAAGAGCTTGACCCCAAAGCAGTGCGCGGTTGTTGAGTTGGCC
CTGGACACCATCAAGCAATATTTCCACGCGGGTGGCGTGGGCCTCAAGAAGACCTTCCTGGAGAAGAGCC
CGGACCTGCAATCCTTGCGCTATGCCCTGTCGCTCTACACGCAGGCCACCGACCTGCTAATCAAGACCTT
TGTACAGACGCAATCGGCCCAGGGCTTGGGTGTAGAAGACCCTGTGGGTGAAGTCTCTGTCCATGTTGAG
CTGTTCACTCATCCAGGAACTGGGGAACACAAGGTCACAGTGAAAGTGGTGGCTGCCAATGACCTCAAGT
GGCAGACTTCTGGCATCTTCCGGCCGTTCATCGAGGTCAACATCATTGGGCCCCAGCTCAGCGACAAGAA
ACGCAAGTTTGCGACCAAATCCAAGAACAATAGCTGGGCTCCCAAGTACAATGAGAGCTTCCAGTTCACG
CTGAGCGCCGACGCGGGTCCCGAGTGCTATGAGCTGCAGGTGTGCGTCAAGGACTACTGCTTCGCGCGCG
AGGACCGCACGGTGGGGCTGGCCGTGCTGCAGCTGCGTGAGCTGGCCCAGCGCGGGAGCGCCGCCTGCTG
GCTGCCGCTCGGCCGCCGCATCCACATGGACGACACGGGCCTCACGGTGCTGCGAATCCTCTCGCAGCGC
AGCAACGACGAGGTGGCCAAGGAGTTCGTGAAGCTCAAGTCGGACACGCGCTCCGCCGAGGAGGGCGGTG
CCGCGCCTGCGCCTTAGCGCGGGCGGTCGGCCGAGCGGCACTGCGCCTGCGCGGAGGGCGCTGGGCGGGG
AGGGACGGGGCTTGCGCCTTGGTGGGACCTCCCCAGGGGCGGGGCTCGGGGGGCTCCACGCCAAGGGTGG
GCTGCGCCTACGCCCTTGACTCAGCTTTCCCTTTTGGGGAATTAGGAATGGAGGATGCCCCGCCCTCTCG
GGAGGCCACGCCCAAGGGCGCGACGAAGGAAGGAGCCACATCCCCAACTTGAGGCCACGCCCCCAGCACC
TAGGGGGCATTTTGAGCTGGGATGGGGGAAACCTCGTCCCTATGGAGGAGGCCACATCCCGGGGCTCTGG
TACCGGGAGGCACCACCTCATGTCCCCTGGAAAAGCCATAAGATGGGACCCAGACCCCTGGGACCCCAGA
CCAATTGCCAAGTATGGAAATCTCAGCTCCCTCGAGGGGGGGCCCTGGGCAAGGGGTAGGGCTCTCTGGA
GCGCCCCTCTAGGTGGCCTGGGGACTGGAGGGACCAGGATGCTGGTTGGAGGGCCCCGGAATACCGGAGT
CCCTTTAGATATTTGTGCAAAAAATAAATGGGGGGAGGGGGGAGGATGGGATTTCAAAAGCACATGCGCC
CTTGGGCGCCCAAACCCTGGGGGCCGAGGGGACGGCTCTGGTTCCCCACGCTGCCCCTACTTCCCTTTGG
GAGTTTGCCTCTCCCTCTCCCCCAACAAACCCAGTCCTCATATCATAGAGTTCAACACACCCATTTGACA
GATGGCAAAACTGAGGCTTAAAGAGCTGCTTGAGACTTGGCCAAGGTTCCAGGTGCCATACCCTCTGTGC
CCCTCCCTTAGGCCTGTGTGCCCCATGGAAGGGTGGGCTGAGATCGGGATGACCTGACACAGCTCCCTAT
TGCTGCTAATTCCCCCTCGGCCTCCTCCAAGGGGTGGGAATTCCAGGCCAAGACCCCTACTTCGCCTTTC
CTTCTCCGGCTGCCAAGCAGGACCTTTGCCCTCAGCCCTTTCTCCTGGGATCTCCATGGGGGATGCCATG
AGGGCCTCCCACCACAAAAGAGAATTTGGGATCCCCTGGTCCCAGGTTTCTCCATCCCTTCTTCCTTTTC
CAGAATTTTCCAAATAGGAAAGAACAGAAGGAGACCAGAAACTCTAGGGGGGAGAAAGAGAATGAGAGAA
AGAGAATGAGAGAGAGAGAAACACAAACACAGTGACACAGTGAGAGCTTAGTCTCCAAGAGCCTATTCAT
TGATTCAAACACCCAAGCCACAGGATACCTCAGATGGCCCTCTTGCCAGCTGGAAGCTCTTTCTCCAATG
AGCAAAGTTACAGTGACCTGGCTGGAGTTACCTGGTGCACATAGGACCTTAGGGGAAAGTTCAGCGTGGA
CTACACTTGCTCTGGGATCTGCTTTTCCACATGTGTGTATGGCACGCCTTTTTCTGCTGGATTGGGAAGG
ACAAGATTTTGCTGTGCTAGGGAGAAATGAAAACGGGGTGAGCTGAGTAGCTGGGTTTCTGGAGGATAGA
ACATCAGATGGGGAGGCTTTCCGAGGTGAAGAATGAGAGGGAACCACTTACTAGAGAGAAAAGAGCTCCA
GGCCTGGGGAACAGCACGTGCGAAGGCCAGGAGAGAAGAACTGTTGAAACAACGAGAAGGGTGGCACGGC
TGGAGCTGAGCCAGCAAGGGGGATCGTGAGGAGCCTTGGGGTTGGGGAGATCTGCAGAAGCATCAGACCA
GGCAGGGCCTCGTACGCAGTCCTGAGGAGTTTTACTTTTATTCTAAGACAGTTGGGGAGCTCCAGGAGCT
GTTTTAAGTTGGGGAGAGACTGGATTCCAGCCTGCAAAAGCTGTTTTGTGAAGACTAAAACCAGTGAGGA
GAGGTGGAGGTGCTTTGGGGACACTGAAATGGATTCTTGGAAAGATTCTGAAGGCTGTGTTGAAAAGACA
CCTATAGCTGTGGGGACATGACTATAATCCCAGCATTTGGGGAGACCGAGGCTGGCAGATCACTTAAGGT
CAGGAGTTTGAGACCAGCCTGGCCAACATGGCGAAACCCCATCTCTGCTAAAAATACAAAAATTAGCTGG
GTGCAGTGGTGCATGCCTGTAGTCCCAGCTACTCAGGAGACTGAGGCGGGAGAATTGTTTGAACCCTGGA
GGCAGAGGTTGTAGTGAGTCGTGATCACACAACTGCACTCCAGCCTGGGCAACAGAACAATACTCCATTC
CCTCCCCTCTACCCCACCAAAAAAAAAAAAAAATCCTGCCCTTAGATGAGCTCTAGGGCTGCTGAGTACA
GTTGTCCCAGTTGCACAGTGCCCAAGGGTTTGGCATTGCTAAGAAGGCCACGTGCAAATCCTAGATATTG
AGTGTTGTATGTTTGTGACGTTGGTTTCCCGACATGTGAATGGCCCAAGTGTCTGGAAGAAGTGGCGCCA
CTTTCTAATTTGCTTGGAGATGTTGCATGTCCCTTAAATTCAGACAGGTGCAGGTAACTGGAGGTTCTGA
ACCAAAGGTTAAAATGCAAATTCTCATACAGGGTTGGGAAGTTGTAGCCAGGGATAAGCTTATGTGACTG
TTATATGGACTGAGGAGCAGATGTGAATTTCGAACCATGACATGGCTGAGGGTAGGGGTCGGGTGGATGG
ATGATTCAGGGTTGTAACCCATAGAGCCCAAAGGGGAAGTGATCTGTGACCTGGGGTGAGGGTGATCTGG
AAGATTTTTGGATGGCTGGAAAGAAATGGGGAAGTCGAGCTGCCTGAGAGAGCCAAGTTATTTCCCAAAA
GATTCCTTAGGAGTCTTTCTGTTCAAGACCTCCGTGTGTGTGTGTGTGTGTTTAGGGTTCCCCAGCAATG
GCCCAGGCATGTGAAGGAAACAAGCTTCTTCAGGGAATATTTGTTGAATGAGTTTTCCTGACTCCCAGGC
TAGAACTGTTTTTGCAATTTCCACCCTCTTTTCTTTCCCCCAGAGAACTCCTATTCGTCCTTCAAAACCC
ATCACGGAAACCCCTCTTGGAGAAAACCCTCCTTCCTTCCCCTCAGGACTTTCCCAGCCACCGTCTCTCC
TCCAGTCCAGCCTGATGCCATGGGACTGGGGGTTTCTCTGTCCAGCTCTGTTTCTCCCAGACTGGGGTCT
GAGGACTCTCAGGACCCCCAACTTTACCTAGCACAGGCTGGGCACAAGTGGGTGACAGGGAGTCTACGCC
TAGTGGAATTATGTATTGGGGCAGGGTCAGTGTGAGAATACACATCCGCATGCATGTCTGTCCATGTCTG
TCCGTACCAACCTTCCCCTTCCACACGGACCTGGGCACATAGGAGGTGTCTGAGCCTGACACATGGGACA
GAGAGTGGACATGGCTGAGACACGGACAGAGAAAAGACAAGGAGTCCAGGGGGCTGAAAGCCTTTTGAAA
TCAGGAAGTTCCTGTATTGGCAGAACAAAGCCCAGAGAGGAGCAGGGCTTTCCTCAACGCCACCCAGCAA
GTGGACACAGAGCCCGGCCTTGGATGACACCTCCAGGGTTCTGAACCCTGGACCTCGCTTTATGCAAGGA
GCTGGCCCCACATTTCCATGAATCGGGGAAACAGCACAAGAAGGTTGGCCTGTGGCAGGGCAAGGGTTAA
AGGGGTGACATTGAGGGATGCCTCAGAGTCAAAGTCCCCTGACCAAGAGGAATAGAGTAGAAAACACAGA
GACAGAGGGTGAGATCACGCCCCGATGAGGACGGAGAGAGACAGAGATGGAGAGAGACATAGAGGTGGAA
ATATACAGAGAAAGATAAATGCAGAGACCAAGGCAGGGAGTGTCGGGGGAAGTAAAGAGGGTGTCCTGAA
GAAAGAAGGATCTGTTCACTCTTACCAGTCTGTCCTCGAATGATTTGCATAAAATGAGGAGGTGCCTGTC
CACACCCCCAATTCCTCTCTCAGGCCCCAGAGCCTGAGACCTCACCATGCCCCCATCAGAGATGCAAAAA
ACTAAACACCCAACTAGAAATCCTTGGGACCTCTCTCGGCTGGGATCTCAGAGCCTTTCTGTCCCCTACC
CCTACCCCATGTGCTGTCGATTTTGCAGATGGGGACAACCTGGGGCCTCCCGGAACTCTGCCACCCTGGG
GAAGTTGGGGGAGGGCCTTAGTCCCGGATCACAACCCCGTCTGCTCCCCAGAATCCTTTCCTAAGAATCG
TTGAGGACCAAAGTTGTCTTTGCTGACACGTGTTGCTTTTCTCTTTGCCTTTTATTGTTTCAGAGAAAAA
TCAAGTTGACTGTGTCAAGTAACACCCCACCCCTTACCCCCGTCCAGCCATAGTGGCTCTCTGGAGACAC
AGGTCACAGGCGGAGGGTCCCCTGATCATCCCCAACCACACAGCCAGGGGGACTTGACCCCTGTCCACCC
CTGTCTCGTGCTCCCTCAGACCCCCACAAACCGGCCAAGCAGTCCGGGGAGGCTTCCCCTCCACACAACT
CTTAGCATGTGATTGCAGATGTGAAATCAAAACGTTGTTTGTTTTTTGTTTTGTTTTGATTCTACCCCGT
CGGTCCAGTGTCTGCACAGACGCCTTCATTTCTCTGTAAATATGTGACTTGGAACAAATGTTTAACACAA
ACGAGAAGTGGTCATGAATGCATGGTGTTGAGATGTTTTGCACTATTCTGACTTTTTGGTCTCTGTAAAA
ATATTTTATTAACAGCAGACATTAAAAAAAGAAAAACCACACACA
(SEQ ID NO: 5057 (SOURCE NCBI Reference Sequence NM_001080421.3)).

[0200] In various embodiments, an UNC13A mRNA transcript comprises the sequence provided as SEQ ID NO: 5058.

GCCCCCGGTGCTGAACCAAGATGGCCGGTGGCGGCCGGGCCCCGGCGTGAGCCAAGCGCGGGCTGCAGCC
GGGAGATGCCCCAGCCCAGCGGCCGCTGAGCCCGACCCGACAGAGCCGGCCCGGCCGCCTCCGGCCCACC
TGCGAGCTCGGAGACATGTCTCTGCTTTGCGTTGGAGTCAAAAAAGCCAAGTTTGATGGTGCCCAAGAGA
AATTCAACACGTACGTGACCCTGAAAGTGCAGAATGTCAAGAGCACGACCATCGCGGTGCGGGGCAGCCA
GCCCAGCTGGGAGCAGGATTTCATGTTCGAGATTAACCGTCTGGATTTGGGACTGACGGTGGAGGTGTGG
AATAAGGGTCTCATCTGGGACACAATGGTGGGCACTGTGTGGATCCCACTGAGGACCATCCGCCAGTCCA
ATGAGGAGGGCCCTGGAGAGTGGCTGACGCTGGACTCCCAGGTCATCATGGCAGACAGTGAGATCTGTGG
CACCAAGGACCCCACCTTCCACCGCATCCTCCTGGACACGCGCTTTGAGCTACCCTTAGACATTCCTGAA
GAGGAGGCTCGCTACTGGGCCAAGAAGCTGGAGCAGCTCAATGCTATGCGGGACCAGGATGAATATTCGT
TCCAAGATGAGCAAGACAAGCCTCTGCCTGTCCCCAGCAACCAGTGCTGCAACTGGAATTATTTTGGCTG
GGGTGAGCAGCACAACGATGACCCCGACAGTGCAGTGGATGATCGTGACAGTGACTACCGCAGTGAAACG
AGCAACAGCATCCCGCCGCCCTATTATACTACGTCACAACCCAACGCCTCAGTCCACCAATATTCTGTTC
GCCCACCACCCCTGGGCTCCCGGGAGTCCTACAGTGACTCCATGCACAGTTACGAGGAGTTCTCTGAGCC
ACAAGCCCTCAGCCCCACGGGTAGCAGCCGCTATGCCTCTTCCGGGGAGCTGAGCCAGGGAAGCTCTCAG
CTGAGCGAGGACTTCGACCCTGACGAGCACAGCCTGCAGGGCTCCGACATGGAGGATGAGCGGGACCGGG
ACTCCTACCACTCCTGCCACAGCTCGGTCAGCTACCACAAAGACTCGCCTCGCTGGGACCAGGATGAGGA
AGAGCTGGAGGAGGACCTGGAGGACTTCCTGGAGGAGGAGGAGCTGCCTGAAGATGAGGAGGAGCTGGAG
GAGGAGGAGGAGGAGGTGCCTGACGATTTGGGCAGCTATGCCCAGCGTGAAGACGTAGCTGTGGCTGAGC
CCAAAGACTTCAAACGCATCAGCCTCCCGCCAGCTGCCCCAGGGAAGGAGGACAAGGCCCCAGTGGCACC
CACCGAGGCCCCCGACATGGCCAAGGTGGCCCCCAAGCCAGCCACGCCCGACAAGGTGCCTGCAGCTGAG
CAGATCCCTGAGGCTGAGCCACCCAAGGACGAGGAGAGTTTCAGGCCGAGAGAGGATGAGGAAGGCCAGG
AGGGGCAGGACTCCATGTCCAGGGCCAAGGCCAACTGGCTGCGTGCCTTCAACAAGGTGCGGATGCAGCT
GCAGGAGGCCCGGGGAGAAGGAGAGATGTCTAAATCCCTATGGTTCAAAGGCGGCCCAGGGGGCGGTCTC
ATCATCATCGACAGCATGCCAGACATCCGCAAGAGGAAACCTATCCCACTCGTGAGCGACTTGTCCCTGG
TCCAGTCCAGGAAAGCGGGCATCACCTCGGCCTTGGCCTCCAGCACGTTGAACAACGAGGAGCTGAAAAA
CCACGTTTACAAGAAGACCCTGCAAGCCTTAATCTACCCCATCTCGTGCACGACGCCACACAACTTCGAA
GTGTGGACGGCCACCACGCCCACCTACTGCTACGAGTGCGAGGGGCTGCTGTGGGGCATCGCGAGGCAGG
GCATGCGCTGCACCGAGTGCGGTGTCAAGTGCCACGAGAAGTGCCAGGACCTGCTCAACGCCGACTGCCT
GCAGCGGGCTGCGGAGAAGAGCTCCAAGCACGGGGCGGAGGACCGGACACAGAACATCATCATGGTGCTC
AAGGACCGCATGAAGATCCGGGAGCGCAACAAGCCCGAGATCTTCGAGCTCATCCAGGAGATCTTCGCGG
TGACCAAGACGGCGCACACGCAGCAGATGAAGGCGGTCAAGCAGAGCGTGCTGGACGGCACGTCCAAGTG
GTCCGCCAAGATCAGCATCACCGTGGTCTGCGCCCAGGGCTTGCAGGCAAAGGACAAGACAGGATCCAGT
GACCCCTATGTCACCGTCCAGGTCGGGAAGACCAAGAAACGGACAAAAACCATCTATGGGAACCTCAACC
CGGTGTGGGAGGAGAATTTCCACTTTGAATGTCACAATTCCTCCGACCGCATCAAGGTGCGCGTCTGGGA
CGAGGATGACGACATCAAATCCCGCGTGAAACAGAGGTTCAAGAGGGAATCTGACGATTTCCTGGGGCAG
ACGATCATTGAGGTGCGGACGCTCAGCGGCGAGATGGACGTGTGGTACAACCTGGACAAGCGAACTGACA
AATCTGCCGTGTCGGGTGCCATCCGGCTCCACATCAGTGTGGAGATCAAAGGCGAGGAGAAGGTGGCCCC
GTACCATGTCCAGTACACCTGTCTGCATGAGAACCTGTTCCACTTCGTGACCGACGTGCAGAACAATGGG
GTCGTGAAGATCCCAGATGCCAAGGGTGACGATGCCTGGAAGGTTTACTACGATGAGACAGCCCAGGAGA
TTGTGGACGAGTTTGCCATGCGCTACGGCGTCGAGTCCATCTACCAAGCCATGACCCACTTTGCCTGCCT
CTCCTCCAAGTATATGTGCCCAGGGGTGCCTGCCGTCATGAGCACCCTGCTCGCCAACATCAATGCCTAC
TACGCACACACCACCGCCTCCACCAACGTGTCTGCCTCCGACCGCTTCGCCGCCTCCAACTTTGGGAAAG
AGCGCTTCGTGAAACTCCTGGACCAGCTGCATAACTCCCTGCGGATTGACCTCTCCATGTACCGGAATAA
CTTCCCAGCCAGCAGCCCGGAGAGACTCCAGGACCTCAAATCCACTGTGGACCTTCTCACCAGCATCACC
TTCTTTCGGATGAAGGTACAAGAACTCCAGAGCCCGCCCCGAGCCAGCCAGGTGGTAAAGGACTGTGTGA
AAGCCTGCCTTAATTCTACCTACGAGTACATCTTCAATAACTGCCATGAACTGTACAGCCGGGAGTACCA
GACAGACCCGGCCAAGAAGGGGGAAGTTCTCCCAGAGGAACAGGGGCCCAGCATCAAGAACCTCGACTTC
TGGTCCAAGCTGATTACCCTCATAGTGTCCATCATTGAGGAAGACAAGAATTCCTACACTCCCTGCCTCA
ACCAGTTTCCCCAGGAGCTGAATGTGGGTAAAATCAGCGCTGAAGTGATGTGGAATCTGTTTGCCCAAGA
CATGAAGTACGCCATGGAGGAGCACGACAAGCATCGTCTATGCAAGAGTGCCGACTACATGAACCTCCAC
TTCAAGGTGAAATGGCTCTACAATGAGTATGTGACGGAACTTCCCGCCTTCAAGGACCGCGTGCCTGAGT
ACCCTGCATGGTTTGAACCCTTCGTCATCCAGTGGCTGGATGAGAATGAGGAGGTGTCCCGGGATTTCCT
GCACGGTGCCCTGGAGCGAGACAAGAAGGATGGGTTCCAGCAGACCTCAGAGCATGCCCTATTCTCCTGC
TCCGTGGTGGATGTTTTCTCCCAACTCAACCAGAGCTTTGAAATCATCAAGAAACTCGAGTGTCCCGACC
CTCAGATCGTGGGGCACTACATGAGGCGCTTTGCCAAGACCATCAGTAATGTGCTCCTCCAGTATGCAGA
CATCATCTCCAAGGACTTTGCCTCCTACTGCTCCAAGGAGAAGGAGAAAGTGCCCTGCATTCTCATGAAT
AACACTCAACAGCTACGAGTTCAGCTGGAGAAGATGTTCGAAGCCATGGGAGGAAAGGAGCTGGATGCTG
AAGCCAGTGACATCCTGAAGGAGCTTCAGGTGAAACTCAATAACGTCTTGGATGAGCTCAGCCGGGTGTT
TGCTACCAGCTTCCAGCCGCACATTGAAGAGTGTGTCAAACAGATGGGTGACATCCTTAGCCAGGTTAAG
GGCACAGGCAATGTGCCAGCCAGTGCCTGCAGCAGCGTGGCCCAGGACGCGGACAATGTGTTGCAGCCCA
TCATGGACCTGCTGGACAGCAACCTGACCCTCTTTGCCAAAATCTGTGAGAAGACTGTGCTGAAGCGAGT
GCTGAAGGAGCTGTGGAAGCTGGTTATGAACACCATGGAGAAAACCATCGTCCTGCCGCCCCTCACTGAC
CAGACGGGGAACCTCTTGAGAAAACATGGCAAGGGATTAGAAAAGGGCAGGGTGAAATTGCCAAGCCACT
CAGACGGAACCCAGATGATCTTCAATGCAGCCAAGGAGCTGGGTCAGCTGTCCAAACTCAAGGATCACAT
GGTACGAGAAGAAGCCAAGAGCTTGACCCCAAAGCAGTGCGCGGTTGTTGAGTTGGCCCTGGACACCATC
AAGCAATATTTCCACGCGGGTGGCGTGGGCCTCAAGAAGACCTTCCTGGAGAAGAGCCCGGACCTGCAAT
CCTTGCGCTATGCCCTGTCGCTCTACACGCAGGCCACCGACCTGCTAATCAAGACCTTTGTACAGACGCA
ATCGGCCCAGGGCTTGGGTGTAGAAGACCCTGTGGGTGAAGTCTCTGTCCATGTTGAGCTGTTCACTCAT
CCAGGAACTGGGGAACACAAGGTCACAGTGAAAGTGGTGGCTGCCAATGACCTCAAGTGGCAGACTTCTG
GCATCTTCCGGCCGTTCATCGAGGTCAACATCATTGGGCCCCAGCTCAGCGACAAGAAACGCAAGTTTGC
GACCAAATCCAAGAACAATAGCTGGGCTCCCAAGTACAATGAGAGCTTCCAGTTCACGCTGAGCGCCGAC
GCGGGTCCCGAGTGCTATGAGCTGCAGGTGTGCGTCAAGGACTACTGCTTCGCGCGCGAGGACCGCACGG
TGGGGCTGGCCGTGCTGCAGCTGCGTGAGCTGGCCCAGCGCGGGAGCGCCGCCTGCTGGCTGCCGCTCGG
CCGCCGCATCCACATGGACGACACGGGCCTCACGGTGCTGCGAATCCTCTCGCAGCGCAGCAACGACGAG
GTGGCCAAGGAGTTCGTGAAGCTCAAGTCGGACACGCGCTCCGCCGAGGAGGGCGGTGCCGCGCCTGCGC
CTTAGCGCGGGCGGTCGGCCGAGCGGCACTGCGCCTGCGCGGAGGGCGCTGGGCGGGGAGGGACGGGGCT
TGCGCCTTGGTGGGACCTCCCCAGGGGCGGGGCTCGGGGGGCTCCACGCCAAGGGTGGGCTGCGCCTACG
CCCTTGACTCAGCTTTCCCTTTTGGGGAATTAGGAATGGAGGATGCCCCGCCCTCTCGGGAGGCCACGCC
CAAGGGCGCGACGAAGGAAGGAGCCACATCCCCAACTTGAGGCCACGCCCCCAGCACCTAGGGGGCATTT
TGAGCTGGGATGGGGGAAACCTCGTCCCTATGGAGGAGGCCACATCCCGGGGCTCTGGTACCGGGAGGCA
CCACCTCATGTCCCCTGGAAAAGCCATAAGATGGGACCCAGACCCCTGGGACCCCAGACCAATTGCCAAG
TATGGAAATCTCAGCTCCCTCGAGGGGGGGCCCTGGGCAAGGGGTAGGGCTCTCTGGAGCGCCCCTCTAG
GTGGCCTGGGGACTGGAGGGACCAGGATGCTGGTTGGAGGGCCCCGGAATACCGGAGTCCCTTTAGATAT
TTGTGCAAAAAATAAATGGGGGGAGGGGGGAGGATGGGATTTCAAAAGCACATGCGCCCTTGGGCGCCCA
AACCCTGGGGGCCGAGGGGACGGCTCTGGTTCCCCACGCTGCCCCTACTTCCCTTTGGGAGTTTGCCTCT
CCCTCTCCCCCAACAAACCCAGTCCTCATATCATAGAGTTCAACACACCCATTTGACAGATGGCAAAACT
GAGGCTTAAAGAGCTGCTTGAGACTTGGCCAAGGTTCCAGGTGCCATACCCTCTGTGCCCCTCCCTTAGG
CCTGTGTGCCCCATGGAAGGGTGGGCTGAGATCGGGATGACCTGACACAGCTCCCTATTGCTGCTAATTC
CCCCTCGGCCTCCTCCAAGGGGTGGGAATTCCAGGCCAAGACCCCTACTTCGCCTTTCCTTCTCCGGCTG
CCAAGCAGGACCTTTGCCCTCAGCCCTTTCTCCTGGGATCTCCATGGGGGATGCCATGAGGGCCTCCCAC
CACAAAAGAGAATTTGGGATCCCCTGGTCCCAGGTTTCTCCATCCCTTCTTCCTTTTCCAGAATTTTCCA
AATAGGAAAGAACAGAAGGAGACCAGAAACTCTAGGGGGGAGAAAGAGAATGAGAGAAAGAGAATGAGAG
AGAGAGAAACACAAACACAGTGACACAGTGAGAGCTTAGTCTCCAAGAGCCTATTCATTGATTCAAACAC
CCAAGCCACAGGATACCTCAGATGGCCCTCTTGCCAGCTGGAAGCTCTTTCTCCAATGAGCAAAGTTACA
GTGACCTGGCTGGAGTTACCTGGTGCACATAGGACCTTAGGGGAAAGTTCAGCGTGGACTACACTTGCTC
TGGGATCTGCTTTTCCACATGTGTGTATGGCACGCCTTTTTCTGCTGGATTGGGAAGGACAAGATTTTGC
TGTGCTAGGGAGAAATGAAAACGGGGTGAGCTGAGTAGCTGGGTTTCTGGAGGATAGAACATCAGATGGG
GAGGCTTTCCGAGGTGAAGAATGAGAGGGAACCACTTACTAGAGAGAAAAGAGCTCCAGGCCTGGGGAAC
AGCACGTGCGAAGGCCAGGAGAGAAGAACTGTTGAAACAACGAGAAGGGTGGCACGGCTGGAGCTGAGCC
AGCAAGGGGGATCGTGAGGAGCCTTGGGGTTGGGGAGATCTGCAGAAGCATCAGACCAGGCAGGGCCTCG
TACGCAGTCCTGAGGAGTTTTACTTTTATTCTAAGACAGTTGGGGAGCTCCAGGAGCTGTTTTAAGTTGG
GGAGAGACTGGATTCCAGCCTGCAAAAGCTGTTTTGTGAAGACTAAAACCAGTGAGGAGAGGTGGAGGTG
CTTTGGGGACACTGAAATGGATTCTTGGAAAGATTCTGAAGGCTGTGTTGAAAAGACACCTATAGCTGTG
GGGACATGACTATAATCCCAGCATTTGGGGAGACCGAGGCTGGCAGATCACTTAAGGTCAGGAGTTTGAG
ACCAGCCTGGCCAACATGGCGAAACCCCATCTCTGCTAAAAATACAAAAATTAGCTGGGTGCAGTGGTGC
ATGCCTGTAGTCCCAGCTACTCAGGAGACTGAGGCGGGAGAATTGTTTGAACCCTGGAGGCAGAGGTTGT
AGTGAGTCGTGATCACACAACTGCACTCCAGCCTGGGCAACAGAACAATACTCCATTCCCTCCCCTCTAC
CCCACCAAAAAAAAAAAAAAATCCTGCCCTTAGATGAGCTCTAGGGCTGCTGAGTACAGTTGTCCCAGTT
GCACAGTGCCCAAGGGTTTGGCATTGCTAAGAAGGCCACGTGCAAATCCTAGATATTGAGTGTTGTATGT
TTGTGACGTTGGTTTCCCGACATGTGAATGGCCCAAGTGTCTGGAAGAAGTGGCGCCACTTTCTAATTTG
CTTGGAGATGTTGCATGTCCCTTAAATTCAGACAGGTGCAGGTAACTGGAGGTTCTGAACCAAAGGTTAA
AATGCAAATTCTCATACAGGGTTGGGAAGTTGTAGCCAGGGATAAGCTTATGTGACTGTTATATGGACTG
AGGAGCAGATGTGAATTTCGAACCATGACATGGCTGAGGGTAGGGGTCGGGTGGATGGATGATTCAGGGT
TGTAACCCATAGAGCCCAAAGGGGAAGTGATCTGTGACCTGGGGTGAGGGTGATCTGGAAGATTTTTGGA
TGGCTGGAAAGAAATGGGGAAGTCGAGCTGCCTGAGAGAGCCAAGTTATTTCCCAAAAGATTCCTTAGGA
GTCTTTCTGTTCAAGACCTCCGTGTGTGTGTGTGTGTGTTTAGGGTTCCCCAGCAATGGCCCAGGCATGT
GAAGGAAACAAGCTTCTTCAGGGAATATTTGTTGAATGAGTTTTCCTGACTCCCAGGCTAGAACTGTTTT
TGCAATTTCCACCCTCTTTTCTTTCCCCCAGAGAACTCCTATTCGTCCTTCAAAACCCATCACGGAAACC
CCTCTTGGAGAAAACCCTCCTTCCTTCCCCTCAGGACTTTCCCAGCCACCGTCTCTCCTCCAGTCCAGCC
TGATGCCATGGGACTGGGGGTTTCTCTGTCCAGCTCTGTTTCTCCCAGACTGGGGTCTGAGGACTCTCAG
GACCCCCAACTTTACCTAGCACAGGCTGGGCACAAGTGGGTGACAGGGAGTCTACGCCTAGTGGAATTAT
GTATTGGGGCAGGGTCAGTGTGAGAATACACATCCGCATGCATGTCTGTCCATGTCTGTCCGTACCAACC
TTCCCCTTCCACACGGACCTGGGCACATAGGAGGTGTCTGAGCCTGACACATGGGACAGAGAGTGGACAT
GGCTGAGACACGGACAGAGAAAAGACAAGGAGTCCAGGGGGCTGAAAGCCTTTTGAAATCAGGAAGTTCC
TGTATTGGCAGAACAAAGCCCAGAGAGGAGCAGGGCTTTCCTCAACGCCACCCAGCAAGTGGACACAGAG
CCCGGCCTTGGATGACACCTCCAGGGTTCTGAACCCTGGACCTCGCTTTATGCAAGGAGCTGGCCCCACA
TTTCCATGAATCGGGGAAACAGCACAAGAAGGTTGGCCTGTGGCAGGGCAAGGGTTAAAGGGGTGACATT
GAGGGATGCCTCAGAGTCAAAGTCCCCTGACCAAGAGGAATAGAGTAGAAAACACAGAGACAGAGGGTGA
GATCACGCCCCGATGAGGACGGAGAGAGACAGAGATGGAGAGAGACATAGAGGTGGAAATATACAGAGAA
AGATAAATGCAGAGACCAAGGCAGGGAGTGTCGGGGGAAGTAAAGAGGGTGTCCTGAAGAAAGAAGGATC
TGTTCACTCTTACCAGTCTGTCCTCGAATGATTTGCATAAAATGAGGAGGTGCCTGTCCACACCCCCAAT
TCCTCTCTCAGGCCCCAGAGCCTGAGACCTCACCATGCCCCCATCAGAGATGCAAAAAACTAAACACCCA
ACTAGAAATCCTTGGGACCTCTCTCGGCTGGGATCTCAGAGCCTTTCTGTCCCCTACCCCTACCCCATGT
GCTGTCGATTTTGCAGATGGGGACAACCTGGGGCCTCCCGGAACTCTGCCACCCTGGGGAAGTTGGGGGA
GGGCCTTAGTCCCGGATCACAACCCCGTCTGCTCCCCAGAATCCTTTCCTAAGAATCGTTGAGGACCAAA
GTTGTCTTTGCTGACACGTGTTGCTTTTCTCTTTGCCTTTTATTGTTTCAGAGAAAAATCAAGTTGACTG
TGTCAAGTAACACCCCACCCCTTACCCCCGTCCAGCCATAGTGGCTCTCTGGAGACACAGGTCACAGGCG
GAGGGTCCCCTGATCATCCCCAACCACACAGCCAGGGGGACTTGACCCCTGTCCACCCCTGTCTCGTGCT
CCCTCAGACCCCCACAAACCGGCCAAGCAGTCCGGGGAGGCTTCCCCTCCACACAACTCTTAGCATGTGA
TTGCAGATGTGAAATCAAAACGTTGTTTGTTTTTTGTTTTGTTTTGATTCTACCCCGTCGGTCCAGTGTC
TGCACAGACGCCTTCATTTCTCTGTAAATATGTGACTTGGAACAAATGTTTAACACAAACGAGAAGTGGT
CATGAATGCATGGTGTTGAGATGTTTTGCACTATTCTGACTTTTTGGTCTCTGTAAAAATATTTTATTAA
CAGCAGACATTAAAAAAAGAAAAACCACACACA
(SEQ ID NO: 5058 (SOURCE NCBI Reference Sequence NM_001387021.1)

[0201] In various embodiments, an UNC13A mRNA transcript comprises the sequence provided as SEQ ID NO: 5059.

GCCCCCGGTGCTGAACCAAGATGGCCGGTGGCGGCCGGGCCCCGGCGTGAGCCAAGCGCGGGCTGCAGCC
GGGAGATGCCCCAGCCCAGCGGCCGCTGAGCCCGACCCGACAGAGCCGGCCCGGCCGCCTCCGGCCCACC
TGCGAGCTCGGAGACATGTCTCTGCTTTGCGTTGGAGTCAAAAAAGCCAAGTTTGATGGTGCCCAAGAGA
AATTCAACACGTACGTGACCCTGAAAGTGCAGAATGTCAAGAGCACGACCATCGCGGTGCGGGGCAGCCA
GCCCAGCTGGGAGCAGGATTTCATGTTCGAGATTAACCGTCTGGATTTGGGACTGACGGTGGAGGTGTGG
AATAAGGGTCTCATCTGGGACACAATGGTGGGCACTGTGTGGATCCCACTGAGGACCATCCGCCAGTCCA
ATGAGGAGGGCCCTGGAGAGTGGCTGACGCTGGACTCCCAGGTCATCATGGCAGACAGTGAGATCTGTGG
CACCAAGGACCCCACCTTCCACCGCATCCTCCTGGACACGCGCTTTGAGCTACCCTTAGACATTCCTGAA
GAGGAGGCTCGCTACTGGGCCAAGAAGCTGGAGCAGCTCAATGCTATGCGGGACCAGGATGAATATTCGT
TCCAAGATGAGCAAGACAAGCCTCTGCCTGTCCCCAGCAACCAGTGCTGCAACTGGAATTATTTTGGCTG
GGGTGAGCAGCACAACGATGACCCCGACAGTGCAGTGGATGATCGTGACAGTGACTACCGCAGTGAAACG
AGCAACAGCATCCCGCCGCCCTATTATACTACGTCACAACCCAACGCCTCAGTCCACCAATATTCTGTTC
GCCCACCACCCCTGGGCTCCCGGGAGTCCTACAGTGACTCCATGCACAGTTACGAGGAGTTCTCTGAGCC
ACAAGCCCTCAGCCCCACGGGTAGCAGCCGCTATGCCTCTTCCGGGGAGCTGAGCCAGGGAAGCTCTCAG
CTGAGCGAGGACTTCGACCCTGACGAGCACAGCCTGCAGGGCTCCGACATGGAGGATGAGCGGGACCGGG
ACTCCTACCACTCCTGCCACAGCTCGGTCAGCTACCACAAAGACTCGCCTCGCTGGGACCAGGATGAGGA
AGAGCTGGAGGAGGACCTGGAGGACTTCCTGGAGGAGGAGGAGCTGCCTGAAGATGAGGAGGAGCTGGAG
GAGGAGGAGGAGGAGGTGCCTGACGATTTGGGCAGCTATGCCCAGCGTGAAGACGTAGCTGTGGCTGAGC
CCAAAGACTTCAAACGCATCAGCCTCCCGCCAGCTGCCCCAGGGAAGGAGGACAAGGCCCCAGTGGCACC
CACCGAGGCCCCCGACATGGCCAAGGTGGCCCCCAAGCCAGCCACGCCCGACAAGGTGCCTGCAGCTGAG
CAGATCCCTGAGGCTGAGCCACCCAAGGACGAGGAGAGTTTCAGGCCGAGAGAGGATGAGGAAGGCCAGG
AGGGGCAGGACTCCATGTCCAGGGCCAAGGCCAACTGGCTGCGTGCCTTCAACAAGGTGCGGATGCAGCT
GCAGGAGGCCCGGGGAGAAGGAGAGATGTCTAAATCCCTATGGTTCAAAGGCGGCCCAGGGGGCGGTCTC
ATCATCATCGACAGCATGCCAGACATCCGCAAGAGGAAACCTATCCCACTCGTGAGCGACTTGTCCCTGG
TCCAGTCCAGGAAAGCGGGCATCACCTCGGCCTTGGCCTCCAGCACGTTGAACAACGAGGAGCTGAAAAA
CCACGTTTACAAGAAGACCCTGCAAGCCTTAATCTACCCCATCTCGTGCACGACGCCACACAACTTCGAA
GTGTGGACGGCCACCACGCCCACCTACTGCTACGAGTGCGAGGGGCTGCTGTGGGGCATCGCGAGGCAGG
GCATGCGCTGCACCGAGTGCGGTGTCAAGTGCCACGAGAAGTGCCAGGACCTGCTCAACGCCGACTGCCT
GCAGCGGGCTGCGGAGAAGAGCTCCAAGCACGGGGCGGAGGACCGGACACAGAACATCATCATGGTGCTC
AAGGACCGCATGAAGATCCGGGAGCGCAACAAGCCCGAGATCTTCGAGCTCATCCAGGAGATCTTCGCGG
TGACCAAGACGGCGCACACGCAGCAGATGAAGGCGGTCAAGCAGAGCGTGCTGGACGGCACGTCCAAGTG
GTCCGCCAAGATCAGCATCACCGTGGTCTGCGCCCAGGGCTTGCAGGCAAAGGACAAGACAGGATCCAGT
GACCCCTATGTCACCGTCCAGGTCGGGAAGACCAAGAAACGGACAAAAACCATCTATGGGAACCTCAACC
CGGTGTGGGAGGAGAATTTCCACTTTGAATGTCACAATTCCTCCGACCGCATCAAGGTGCGCGTCTGGGA
CGAGGATGACGACATCAAATCCCGCGTGAAACAGAGGTTCAAGAGGGAATCTGACGATTTCCTGGGGCAG
ACGATCATTGAGGTGCGGACGCTCAGCGGCGAGATGGACGTGTGGTACAACCTGGACAAGCGAACTGACA
AATCTGCCGTGTCGGGTGCCATCCGGCTCCACATCAGTGTGGAGATCAAAGGCGAGGAGAAGGTGGCCCC
GTACCATGTCCAGTACACCTGTCTGCATGAGAACCTGTTCCACTTCGTGACCGACGTGCAGAACAATGGG
GTCGTGAAGATCCCAGATGCCAAGGGTGACGATGCCTGGAAGGTTTACTACGATGAGACAGCCCAGGAGA
TTGTGGACGAGTTTGCCATGCGCTACGGCGTCGAGTCCATCTACCAAGCCATGACCCACTTTGCCTGCCT
CTCCTCCAAGTATATGTGCCCAGGGGTGCCTGCCGTCATGAGCACCCTGCTCGCCAACATCAATGCCTAC
TACGCACACACCACCGCCTCCACCAACGTGTCTGCCTCCGACCGCTTCGCCGCCTCCAACTTTGGGAAAG
AGCGCTTCGTGAAACTCCTGGACCAGCTGCATAACTCCCTGCGGATTGACCTCTCCATGTACCGGAATAA
CTTCCCAGCCAGCAGCCCGGAGAGACTCCAGGACCTCAAATCCACTGTGGACCTTCTCACCAGCATCACC
TTCTTTCGGATGAAGGTACAAGAACTCCAGAGCCCGCCCCGAGCCAGCCAGGTGGTAAAGGACTGTGTGA
AAGCCTGCCTTAATTCTACCTACGAGTACATCTTCAATAACTGCCATGAACTGTACAGCCGGGAGTACCA
GACAGACCCGGCCAAGAAGGGGGAAGTTCTCCCAGAGGAACAGGGGCCCAGCATCAAGAACCTCGACTTC
TGGTCCAAGCTGATTACCCTCATAGTGTCCATCATTGAGGAAGACAAGAATTCCTACACTCCCTGCCTCA
ACCAGTTTCCCCAGGAGCTGAATGTGGGTAAAATCAGCGCTGAAGTGATGTGGAATCTGTTTGCCCAAGA
CATGAAGTACGCCATGGAGGAGCACGACAAGCATCGTCTATGCAAGAGTGCCGACTACATGAACCTCCAC
TTCAAGGTGAAATGGCTCTACAATGAGTATGTGACGGAACTTCCCGCCTTCAAGGACCGCGTGCCTGAGT
ACCCTGCATGGTTTGAACCCTTCGTCATCCAGTGGCTGGATGAGAATGAGGAGGTGTCCCGGGATTTCCT
GCACGGTGCCCTGGAGCGAGACAAGAAGGATGGGTTCCAGCAGACCTCAGAGCATGCCCTATTCTCCTGC
TCCGTGGTGGATGTTTTCTCCCAACTCAACCAGAGCTTTGAAATCATCAAGAAACTCGAGTGTCCCGACC
CTCAGATCGTGGGGCACTACATGAGGCGCTTTGCCAAGACCATCAGTAATGTGCTCCTCCAGTATGCAGA
CATCATCTCCAAGGACTTTGCCTCCTACTGCTCCAAGGAGAAGGAGAAACCCTGCATTCTCATGAATAAC
ACTCAACAGCTACGAGTTCAGCTGGAGAAGATGTTCGAAGCCATGGGAGGAAAGGAGCTGGATGCTGAAG
CCAGTGACATCCTGAAGGAGCTTCAGGTGAAACTCAATAACGTCTTGGATGAGCTCAGCCGGGTGTTTGC
TACCAGCTTCCAGCCGCACATTGAAGAGTGTGTCAAACAGATGGGTGACATCCTTAGCCAGGTTAAGGGC
ACAGGCAATGTGCCAGCCAGTGCCTGCAGCAGCGTGGCCCAGGACGCGGACAATGTGTTGCAGCCCATCA
TGGACCTGCTGGACAGCAACCTGACCCTCTTTGCCAAAATCTGTGAGAAGACTGTGCTGAAGCGAGTGCT
GAAGGAGCTGTGGAAGCTGGTTATGAACACCATGGAGAAAACCATCGTCCTGCCGCCCCTCACTGACCAG
ACGGGGAACCTCTTGAGAAAACATGGCAAGGGATTAGAAAAGGGCAGGGTGAAATTGCCAAGCCACTCAG
ACGGAACCCAGATGATCTTCAATGCAGCCAAGGAGCTGGGTCAGCTGTCCAAACTCAAGGATCACATGGT
ACGAGAAGAAGCCAAGAGCTTGACCCCAAAGCAGTGCGCGGTTGTTGAGTTGGCCCTGGACACCATCAAG
CAATATTTCCACGCGGGTGGCGTGGGCCTCAAGAAGACCTTCCTGGAGAAGAGCCCGGACCTGCAATCCT
TGCGCTATGCCCTGTCGCTCTACACGCAGGCCACCGACCTGCTAATCAAGACCTTTGTACAGACGCAATC
GGCCCAGGGCTTGGGTGTAGAAGACCCTGTGGGTGAAGTCTCTGTCCATGTTGAGCTGTTCACTCATCCA
GGAACTGGGGAACACAAGGTCACAGTGAAAGTGGTGGCTGCCAATGACCTCAAGTGGCAGACTTCTGGCA
TCTTCCGGCCGTTCATCGAGGTCAACATCATTGGGCCCCAGCTCAGCGACAAGAAACGCAAGTTTGCGAC
CAAATCCAAGAACAATAGCTGGGCTCCCAAGTACAATGAGAGCTTCCAGTTCACGCTGAGCGCCGACGCG
GGTCCCGAGTGCTATGAGCTGCAGGTGTGCGTCAAGGACTACTGCTTCGCGCGCGAGGACCGCACGGTGG
GGCTGGCCGTGCTGCAGCTGCGTGAGCTGGCCCAGCGCGGGAGCGCCGCCTGCTGGCTGCCGCTCGGCCG
CCGCATCCACATGGACGACACGGGCCTCACGGTGCTGCGAATCCTCTCGCAGCGCAGCAACGACGAGGTG
GCCAAGGAGTTCGTGAAGCTCAAGTCGGACACGCGCTCCGCCGAGGAGGGCGGTGCCGCGCCTGCGCCTT
AGCGCGGGCGGTCGGCCGAGCGGCACTGCGCCTGCGCGGAGGGCGCTGGGCGGGGAGGGACGGGGCTTGC
GCCTTGGTGGGACCTCCCCAGGGGCGGGGCTCGGGGGGCTCCACGCCAAGGGTGGGCTGCGCCTACGCCC
TTGACTCAGCTTTCCCTTTTGGGGAATTAGGAATGGAGGATGCCCCGCCCTCTCGGGAGGCCACGCCCAA
GGGCGCGACGAAGGAAGGAGCCACATCCCCAACTTGAGGCCACGCCCCCAGCACCTAGGGGGCATTTTGA
GCTGGGATGGGGGAAACCTCGTCCCTATGGAGGAGGCCACATCCCGGGGCTCTGGTACCGGGAGGCACCA
CCTCATGTCCCCTGGAAAAGCCATAAGATGGGACCCAGACCCCTGGGACCCCAGACCAATTGCCAAGTAT
GGAAATCTCAGCTCCCTCGAGGGGGGGCCCTGGGCAAGGGGTAGGGCTCTCTGGAGCGCCCCTCTAGGTG
GCCTGGGGACTGGAGGGACCAGGATGCTGGTTGGAGGGCCCCGGAATACCGGAGTCCCTTTAGATATTTG
TGCAAAAAATAAATGGGGGGAGGGGGGAGGATGGGATTTCAAAAGCACATGCGCCCTTGGGCGCCCAAAC
CCTGGGGGCCGAGGGGACGGCTCTGGTTCCCCACGCTGCCCCTACTTCCCTTTGGGAGTTTGCCTCTCCC
TCTCCCCCAACAAACCCAGTCCTCATATCATAGAGTTCAACACACCCATTTGACAGATGGCAAAACTGAG
GCTTAAAGAGCTGCTTGAGACTTGGCCAAGGTTCCAGGTGCCATACCCTCTGTGCCCCTCCCTTAGGCCT
GTGTGCCCCATGGAAGGGTGGGCTGAGATCGGGATGACCTGACACAGCTCCCTATTGCTGCTAATTCCCC
CTCGGCCTCCTCCAAGGGGTGGGAATTCCAGGCCAAGACCCCTACTTCGCCTTTCCTTCTCCGGCTGCCA
AGCAGGACCTTTGCCCTCAGCCCTTTCTCCTGGGATCTCCATGGGGGATGCCATGAGGGCCTCCCACCAC
AAAAGAGAATTTGGGATCCCCTGGTCCCAGGTTTCTCCATCCCTTCTTCCTTTTCCAGAATTTTCCAAAT
AGGAAAGAACAGAAGGAGACCAGAAACTCTAGGGGGGAGAAAGAGAATGAGAGAAAGAGAATGAGAGAGA
GAGAAACACAAACACAGTGACACAGTGAGAGCTTAGTCTCCAAGAGCCTATTCATTGATTCAAACACCCA
AGCCACAGGATACCTCAGATGGCCCTCTTGCCAGCTGGAAGCTCTTTCTCCAATGAGCAAAGTTACAGTG
ACCTGGCTGGAGTTACCTGGTGCACATAGGACCTTAGGGGAAAGTTCAGCGTGGACTACACTTGCTCTGG
GATCTGCTTTTCCACATGTGTGTATGGCACGCCTTTTTCTGCTGGATTGGGAAGGACAAGATTTTGCTGT
GCTAGGGAGAAATGAAAACGGGGTGAGCTGAGTAGCTGGGTTTCTGGAGGATAGAACATCAGATGGGGAG
GCTTTCCGAGGTGAAGAATGAGAGGGAACCACTTACTAGAGAGAAAAGAGCTCCAGGCCTGGGGAACAGC
ACGTGCGAAGGCCAGGAGAGAAGAACTGTTGAAACAACGAGAAGGGTGGCACGGCTGGAGCTGAGCCAGC
AAGGGGGATCGTGAGGAGCCTTGGGGTTGGGGAGATCTGCAGAAGCATCAGACCAGGCAGGGCCTCGTAC
GCAGTCCTGAGGAGTTTTACTTTTATTCTAAGACAGTTGGGGAGCTCCAGGAGCTGTTTTAAGTTGGGGA
GAGACTGGATTCCAGCCTGCAAAAGCTGTTTTGTGAAGACTAAAACCAGTGAGGAGAGGTGGAGGTGCTT
TGGGGACACTGAAATGGATTCTTGGAAAGATTCTGAAGGCTGTGTTGAAAAGACACCTATAGCTGTGGGG
ACATGACTATAATCCCAGCATTTGGGGAGACCGAGGCTGGCAGATCACTTAAGGTCAGGAGTTTGAGACC
AGCCTGGCCAACATGGCGAAACCCCATCTCTGCTAAAAATACAAAAATTAGCTGGGTGCAGTGGTGCATG
CCTGTAGTCCCAGCTACTCAGGAGACTGAGGCGGGAGAATTGTTTGAACCCTGGAGGCAGAGGTTGTAGT
GAGTCGTGATCACACAACTGCACTCCAGCCTGGGCAACAGAACAATACTCCATTCCCTCCCCTCTACCCC
ACCAAAAAAAAAAAAAAATCCTGCCCTTAGATGAGCTCTAGGGCTGCTGAGTACAGTTGTCCCAGTTGCA
CAGTGCCCAAGGGTTTGGCATTGCTAAGAAGGCCACGTGCAAATCCTAGATATTGAGTGTTGTATGTTTG
TGACGTTGGTTTCCCGACATGTGAATGGCCCAAGTGTCTGGAAGAAGTGGCGCCACTTTCTAATTTGCTT
GGAGATGTTGCATGTCCCTTAAATTCAGACAGGTGCAGGTAACTGGAGGTTCTGAACCAAAGGTTAAAAT
GCAAATTCTCATACAGGGTTGGGAAGTTGTAGCCAGGGATAAGCTTATGTGACTGTTATATGGACTGAGG
AGCAGATGTGAATTTCGAACCATGACATGGCTGAGGGTAGGGGTCGGGTGGATGGATGATTCAGGGTTGT
AACCCATAGAGCCCAAAGGGGAAGTGATCTGTGACCTGGGGTGAGGGTGATCTGGAAGATTTTTGGATGG
CTGGAAAGAAATGGGGAAGTCGAGCTGCCTGAGAGAGCCAAGTTATTTCCCAAAAGATTCCTTAGGAGTC
TTTCTGTTCAAGACCTCCGTGTGTGTGTGTGTGTGTTTAGGGTTCCCCAGCAATGGCCCAGGCATGTGAA
GGAAACAAGCTTCTTCAGGGAATATTTGTTGAATGAGTTTTCCTGACTCCCAGGCTAGAACTGTTTTTGC
AATTTCCACCCTCTTTTCTTTCCCCCAGAGAACTCCTATTCGTCCTTCAAAACCCATCACGGAAACCCCT
CTTGGAGAAAACCCTCCTTCCTTCCCCTCAGGACTTTCCCAGCCACCGTCTCTCCTCCAGTCCAGCCTGA
TGCCATGGGACTGGGGGTTTCTCTGTCCAGCTCTGTTTCTCCCAGACTGGGGTCTGAGGACTCTCAGGAC
CCCCAACTTTACCTAGCACAGGCTGGGCACAAGTGGGTGACAGGGAGTCTACGCCTAGTGGAATTATGTA
TTGGGGCAGGGTCAGTGTGAGAATACACATCCGCATGCATGTCTGTCCATGTCTGTCCGTACCAACCTTC
CCCTTCCACACGGACCTGGGCACATAGGAGGTGTCTGAGCCTGACACATGGGACAGAGAGTGGACATGGC
TGAGACACGGACAGAGAAAAGACAAGGAGTCCAGGGGGCTGAAAGCCTTTTGAAATCAGGAAGTTCCTGT
ATTGGCAGAACAAAGCCCAGAGAGGAGCAGGGCTTTCCTCAACGCCACCCAGCAAGTGGACACAGAGCCC
GGCCTTGGATGACACCTCCAGGGTTCTGAACCCTGGACCTCGCTTTATGCAAGGAGCTGGCCCCACATTT
CCATGAATCGGGGAAACAGCACAAGAAGGTTGGCCTGTGGCAGGGCAAGGGTTAAAGGGGTGACATTGAG
GGATGCCTCAGAGTCAAAGTCCCCTGACCAAGAGGAATAGAGTAGAAAACACAGAGACAGAGGGTGAGAT
CACGCCCCGATGAGGACGGAGAGAGACAGAGATGGAGAGAGACATAGAGGTGGAAATATACAGAGAAAGA
TAAATGCAGAGACCAAGGCAGGGAGTGTCGGGGGAAGTAAAGAGGGTGTCCTGAAGAAAGAAGGATCTGT
TCACTCTTACCAGTCTGTCCTCGAATGATTTGCATAAAATGAGGAGGTGCCTGTCCACACCCCCAATTCC
TCTCTCAGGCCCCAGAGCCTGAGACCTCACCATGCCCCCATCAGAGATGCAAAAAACTAAACACCCAACT
AGAAATCCTTGGGACCTCTCTCGGCTGGGATCTCAGAGCCTTTCTGTCCCCTACCCCTACCCCATGTGCT
GTCGATTTTGCAGATGGGGACAACCTGGGGCCTCCCGGAACTCTGCCACCCTGGGGAAGTTGGGGGAGGG
CCTTAGTCCCGGATCACAACCCCGTCTGCTCCCCAGAATCCTTTCCTAAGAATCGTTGAGGACCAAAGTT
GTCTTTGCTGACACGTGTTGCTTTTCTCTTTGCCTTTTATTGTTTCAGAGAAAAATCAAGTTGACTGTGT
CAAGTAACACCCCACCCCTTACCCCCGTCCAGCCATAGTGGCTCTCTGGAGACACAGGTCACAGGCGGAG
GGTCCCCTGATCATCCCCAACCACACAGCCAGGGGGACTTGACCCCTGTCCACCCCTGTCTCGTGCTCCC
TCAGACCCCCACAAACCGGCCAAGCAGTCCGGGGAGGCTTCCCCTCCACACAACTCTTAGCATGTGATTG
CAGATGTGAAATCAAAACGTTGTTTGTTTTTTGTTTTGTTTTGATTCTACCCCGTCGGTCCAGTGTCTGC
ACAGACGCCTTCATTTCTCTGTAAATATGTGACTTGGAACAAATGTTTAACACAAACGAGAAGTGGTCAT
GAATGCATGGTGTTGAGATGTTTTGCACTATTCTGACTTTTTGGTCTCTGTAAAAATATTTTATTAACAG
CAGACATTAAAAAAAGAAAAACCACACACA
(SEQ ID NO: 5059 (SOURCE NCBI Reference Sequence NM_001387022.1)).

[0202] In various embodiments, an UNC13A mRNA transcript comprises the sequence provided as SEQ ID NO: 5060.

GCCCCCGGTGCTGAACCAAGATGGCCGGTGGCGGCCGGGCCCCGGCGTGAGCCAAGCGCGGGCTGCAGCC
GGGAGATGCCCCAGCCCAGCGGCCGCTGAGCCCGACCCGACAGAGCCGGCCCGGCCGCCTCCGGCCCACC
TGCGAGCTCGGAGACATGTCTCTGCTTTGCGTTGGAGTCAAAAAAGCCAAGTTTGATGGTGCCCAAGAGA
AATTCAACACGTACGTGACCCTGAAAGTGCAGAATGTCAAGAGCACGACCATCGCGGTGCGGGGCAGCCA
GCCCAGCTGGGAGCAGGATTTCATGTTCGAGATTAACCGTCTGGATTTGGGACTGACGGTGGAGGTGTGG
AATAAGGGTCTCATCTGGGACACAATGGTGGGCACTGTGTGGATCCCACTGAGGACCATCCGCCAGTCCA
ATGAGGAGGGCCCTGGAGAGTGGCTGACGCTGGACTCCCAGGTCATCATGGCAGACAGTGAGATCTGTGG
CACCAAGGACCCCACCTTCCACCGCATCCTCCTGGACACGCGCTTTGAGCTACCCTTAGACATTCCTGAA
GAGGAGGCTCGCTACTGGGCCAAGAAGCTGGAGCAGCTCAATGCTATGCGGGACCAGGATGAATATTCGT
TCCAAGATGAGCAAGACAAGCCTCTGCCTGTCCCCAGCAACCAGTGCTGCAACTGGAATTATTTTGGCTG
GGGTGAGCAGCACAACGATGACCCCGACAGTGCAGTGGATGATCGTGACAGTGACTACCGCAGTGAAACG
AGCAACAGCATCCCGCCGCCCTATTATACTACGTCACAACCCAACGCCTCAGTCCACCAATATTCTGTTC
GCCCACCACCCCTGGGCTCCCGGGAGTCCTACAGTGACTCCATGCACAGTTACGAGGAGTTCTCTGAGCC
ACAAGCCCTCAGCCCCACGGGTAGCAGCCGCTATGCCTCTTCCGGGGAGCTGAGCCAGGGAAGCTCTCAG
CTGAGCGAGGACTTCGACCCTGACGAGCACAGCCTGCAGGGCTCCGACATGGAGGATGAGCGGGACCGGG
ACTCCTACCACTCCTGCCACAGCTCGGTCAGCTACCACAAAGACTCGCCTCGCTGGGACCAGGATGAGGA
AGAGCTGGAGGAGGACCTGGAGGACTTCCTGGAGGAGGAGGAGCTGCCTGAAGATGAGGAGGAGCTGGAG
GAGGAGGAGGAGGAGGTGCCTGACGATTTGGGCAGCTATGCCCAGCGTGAAGACGTAGCTGTGGCTGAGC
CCAAAGACTTCAAACGCATCAGCCTCCCGCCAGCTGCCCCAGGGAAGGAGGACAAGGCCCCAGTGGCACC
CACCGAGGCCCCCGACATGGCCAAGGTGGCCCCCAAGCCAGCCACGCCCGACAAGGTGCCTGCAGCTGAG
CAGATCCCTGAGGCTGAGCCACCCAAGGACGAGGAGAGTTTCAGGCCGAGAGAGGATGAGGAAGGCCAGG
AGGGGCAGGACTCCATGTCCAGGGCCAAGGCCAACTGGCTGCGTGCCTTCAACAAGGTGCGGATGCAGCT
GCAGGAGGCCCGGGGAGAAGGAGAGATGTCTAAATCCCTATGGTTCAAAGGCGGCCCAGGGGGCGGTCTC
ATCATCATCGACAGCATGCCAGACATCCGCAAGAGGAAACCTATCCCACTCGTGAGCGACTTGTCCCTGG
TCCAGTCCAGGAAAGCGGGCATCACCTCGGCCTTGGCCTCCAGCACGTTGAACAACGAGGAGCTGAAAAA
CCACGTTTACAAGAAGACCCTGCAAGCCTTAATCTACCCCATCTCGTGCACGACGCCACACAACTTCGAA
GTGTGGACGGCCACCACGCCCACCTACTGCTACGAGTGCGAGGGGCTGCTGTGGGGCATCGCGAGGCAGG
GCATGCGCTGCACCGAGTGCGGTGTCAAGTGCCACGAGAAGTGCCAGGACCTGCTCAACGCCGACTGCCT
GCAGCGGGCTGCGGAGAAGAGCTCCAAGCACGGGGCGGAGGACCGGACACAGAACATCATCATGGTGCTC
AAGGACCGCATGAAGATCCGGGAGCGCAACAAGCCCGAGATCTTCGAGCTCATCCAGGAGATCTTCGCGG
TGACCAAGACGGCGCACACGCAGCAGATGAAGGCGGTCAAGCAGAGCGTGCTGGACGGCACGTCCAAGTG
GTCCGCCAAGATCAGCATCACCGTGGTCTGCGCCCAGGGCTTGCAGGCAAAGGACAAGACAGGATCCAGT
GACCCCTATGTCACCGTCCAGGTCGGGAAGACCAAGAAACGGACAAAAACCATCTATGGGAACCTCAACC
CGGTGTGGGAGGAGAATTTCCACTTTGAATGTCACAATTCCTCCGACCGCATCAAGGTGCGCGTCTGGGA
CGAGGATGACGACATCAAATCCCGCGTGAAACAGAGGTTCAAGAGGGAATCTGACGATTTCCTGGGGCAG
ACGATCATTGAGGTGCGGACGCTCAGCGGCGAGATGGACGTGTGGTACAACCTGGACAAGCGAACTGACA
AATCTGCCGTGTCGGGTGCCATCCGGCTCCACATCAGTGTGGAGATCAAAGGCGAGGAGAAGGTGGCCCC
GTACCATGTCCAGTACACCTGTCTGCATGAGAACCTGTTCCACTTCGTGACCGACGTGCAGAACAATGGG
GTCGTGAAGATCCCAGATGCCAAGGGTGACGATGCCTGGAAGGTTTACTACGATGAGACAGCCCAGGAGA
TTGTGGACGAGTTTGCCATGCGCTACGGCGTCGAGTCCATCTACCAAGCCATGACCCACTTTGCCTGCCT
CTCCTCCAAGTATATGTGCCCAGGGGTGCCTGCCGTCATGAGCACCCTGCTCGCCAACATCAATGCCTAC
TACGCACACACCACCGCCTCCACCAACGTGTCTGCCTCCGACCGCTTCGCCGCCTCCAACTTTGGGAAAG
AGCGCTTCGTGAAACTCCTGGACCAGCTGCATAACTCCCTGCGGATTGACCTCTCCATGTACCGGAATAA
CTTCCCAGCCAGCAGCCCGGAGAGACTCCAGGACCTCAAATCCACTGTGGACCTTCTCACCAGCATCACC
TTCTTTCGGATGAAGGTACAAGAACTCCAGAGCCCGCCCCGAGCCAGCCAGGTGGTAAAGGACTGTGTGA
AAGCCTGCCTTAATTCTACCTACGAGTACATCTTCAATAACTGCCATGAACTGTACAGCCGGGAGTACCA
GACAGACCCGGCCAAGAAGGGGGAAGTTCTCCCAGAGGAACAGGGGCCCAGCATCAAGAACCTCGACTTC
TGGTCCAAGCTGATTACCCTCATAGTGTCCATCATTGAGGAAGACAAGAATTCCTACACTCCCTGCCTCA
ACCAGTTTCCCCAGGAGCTGAATGTGGGTAAAATCAGCGCTGAAGTGATGTGGAATCTGTTTGCCCAAGA
CATGAAGTACGCCATGGAGGAGCACGACAAGCATCGTCTATGCAAGAGTGCCGACTACATGAACCTCCAC
TTCAAGGTGAAATGGCTCTACAATGAGTATGTGACGGAACTTCCCGCCTTCAAGGACCGCGTGCCTGAGT
ACCCTGCATGGTTTGAACCCTTCGTCATCCAGTGGCTGGATGAGAATGAGGAGGTGTCCCGGGATTTCCT
GCACGGTGCCCTGGAGCGAGACAAGAAGGATGGGTTCCAGCAGACCTCAGAGCATGCCCTATTCTCCTGC
TCCGTGGTGGATGTTTTCTCCCAACTCAACCAGAGCTTTGAAATCATCAAGAAACTCGAGTGTCCCGACC
CTCAGATCGTGGGGCACTACATGAGGCGCTTTGCCAAGACCATCAGTAATGTGCTCCTCCAGTATGCAGA
CATCATCTCCAAGGACTTTGCCTCCTACTGCTCCAAGGAGAAGGAGAAAGTGCCCTGCATTCTCATGAAT
AACACTCAACAGCTACGAGTTCAGCTGGAGAAGATGTTCGAAGCCATGGGAGGAAAGGAGCTGGATGCTG
AAGCCAGTGACATCCTGAAGGAGCTTCAGGTGAAACTCAATAACGTCTTGGATGAGCTCAGCCGGGTGTT
TGCTACCAGCTTCCAGCCGCACATTGAAGAGTGTGTCAAACAGATGGGTGACATCCTTAGCCAGGTTAAG
GGCACAGGCAATGTGCCAGCCAGTGCCTGCAGCAGCGTGGCCCAGGACGCGGACAATGTGTTGCAGCCCA
TCATGGACCTGCTGGACAGCAACCTGACCCTCTTTGCCAAAATCTGTGAGAAGACTGTGCTGAAGCGAGT
GCTGAAGGAGCTGTGGAAGCTGGTTATGAACACCATGGAGAAAACCATCGTCCTGCCGCCCCTCACTGAC
CAGACGGGAACCCAGATGATCTTCAATGCAGCCAAGGAGCTGGGTCAGCTGTCCAAACTCAAGGATCACA
TGGTACGAGAAGAAGCCAAGAGCTTGACCCCAAAGCAGTGCGCGGTTGTTGAGTTGGCCCTGGACACCAT
CAAGCAATATTTCCACGCGGGTGGCGTGGGCCTCAAGAAGACCTTCCTGGAGAAGAGCCCGGACCTGCAA
TCCTTGCGCTATGCCCTGTCGCTCTACACGCAGGCCACCGACCTGCTAATCAAGACCTTTGTACAGACGC
AATCGGCCCAGGGCTTGGGTGTAGAAGACCCTGTGGGTGAAGTCTCTGTCCATGTTGAGCTGTTCACTCA
TCCAGGAACTGGGGAACACAAGGTCACAGTGAAAGTGGTGGCTGCCAATGACCTCAAGTGGCAGACTTCT
GGCATCTTCCGGCCGTTCATCGAGGTCAACATCATTGGGCCCCAGCTCAGCGACAAGAAACGCAAGTTTG
CGACCAAATCCAAGAACAATAGCTGGGCTCCCAAGTACAATGAGAGCTTCCAGTTCACGCTGAGCGCCGA
CGCGGGTCCCGAGTGCTATGAGCTGCAGGTGTGCGTCAAGGACTACTGCTTCGCGCGCGAGGACCGCACG
GTGGGGCTGGCCGTGCTGCAGCTGCGTGAGCTGGCCCAGCGCGGGAGCGCCGCCTGCTGGCTGCCGCTCG
GCCGCCGCATCCACATGGACGACACGGGCCTCACGGTGCTGCGAATCCTCTCGCAGCGCAGCAACGACGA
GGTGGCCAAGGAGTTCGTGAAGCTCAAGTCGGACACGCGCTCCGCCGAGGAGGGCGGTGCCGCGCCTGCG
CCTTAGCGCGGGCGGTCGGCCGAGCGGCACTGCGCCTGCGCGGAGGGCGCTGGGCGGGGAGGGACGGGGC
TTGCGCCTTGGTGGGACCTCCCCAGGGGCGGGGCTCGGGGGGCTCCACGCCAAGGGTGGGCTGCGCCTAC
GCCCTTGACTCAGCTTTCCCTTTTGGGGAATTAGGAATGGAGGATGCCCCGCCCTCTCGGGAGGCCACGC
CCAAGGGCGCGACGAAGGAAGGAGCCACATCCCCAACTTGAGGCCACGCCCCCAGCACCTAGGGGGCATT
TTGAGCTGGGATGGGGGAAACCTCGTCCCTATGGAGGAGGCCACATCCCGGGGCTCTGGTACCGGGAGGC
ACCACCTCATGTCCCCTGGAAAAGCCATAAGATGGGACCCAGACCCCTGGGACCCCAGACCAATTGCCAA
GTATGGAAATCTCAGCTCCCTCGAGGGGGGGCCCTGGGCAAGGGGTAGGGCTCTCTGGAGCGCCCCTCTA
GGTGGCCTGGGGACTGGAGGGACCAGGATGCTGGTTGGAGGGCCCCGGAATACCGGAGTCCCTTTAGATA
TTTGTGCAAAAAATAAATGGGGGGAGGGGGGAGGATGGGATTTCAAAAGCACATGCGCCCTTGGGCGCCC
AAACCCTGGGGGCCGAGGGGACGGCTCTGGTTCCCCACGCTGCCCCTACTTCCCTTTGGGAGTTTGCCTC
TCCCTCTCCCCCAACAAACCCAGTCCTCATATCATAGAGTTCAACACACCCATTTGACAGATGGCAAAAC
TGAGGCTTAAAGAGCTGCTTGAGACTTGGCCAAGGTTCCAGGTGCCATACCCTCTGTGCCCCTCCCTTAG
GCCTGTGTGCCCCATGGAAGGGTGGGCTGAGATCGGGATGACCTGACACAGCTCCCTATTGCTGCTAATT
CCCCCTCGGCCTCCTCCAAGGGGTGGGAATTCCAGGCCAAGACCCCTACTTCGCCTTTCCTTCTCCGGCT
GCCAAGCAGGACCTTTGCCCTCAGCCCTTTCTCCTGGGATCTCCATGGGGGATGCCATGAGGGCCTCCCA
CCACAAAAGAGAATTTGGGATCCCCTGGTCCCAGGTTTCTCCATCCCTTCTTCCTTTTCCAGAATTTTCC
AAATAGGAAAGAACAGAAGGAGACCAGAAACTCTAGGGGGGAGAAAGAGAATGAGAGAAAGAGAATGAGA
GAGAGAGAAACACAAACACAGTGACACAGTGAGAGCTTAGTCTCCAAGAGCCTATTCATTGATTCAAACA
CCCAAGCCACAGGATACCTCAGATGGCCCTCTTGCCAGCTGGAAGCTCTTTCTCCAATGAGCAAAGTTAC
AGTGACCTGGCTGGAGTTACCTGGTGCACATAGGACCTTAGGGGAAAGTTCAGCGTGGACTACACTTGCT
CTGGGATCTGCTTTTCCACATGTGTGTATGGCACGCCTTTTTCTGCTGGATTGGGAAGGACAAGATTTTG
CTGTGCTAGGGAGAAATGAAAACGGGGTGAGCTGAGTAGCTGGGTTTCTGGAGGATAGAACATCAGATGG
GGAGGCTTTCCGAGGTGAAGAATGAGAGGGAACCACTTACTAGAGAGAAAAGAGCTCCAGGCCTGGGGAA
CAGCACGTGCGAAGGCCAGGAGAGAAGAACTGTTGAAACAACGAGAAGGGTGGCACGGCTGGAGCTGAGC
CAGCAAGGGGGATCGTGAGGAGCCTTGGGGTTGGGGAGATCTGCAGAAGCATCAGACCAGGCAGGGCCTC
GTACGCAGTCCTGAGGAGTTTTACTTTTATTCTAAGACAGTTGGGGAGCTCCAGGAGCTGTTTTAAGTTG
GGGAGAGACTGGATTCCAGCCTGCAAAAGCTGTTTTGTGAAGACTAAAACCAGTGAGGAGAGGTGGAGGT
GCTTTGGGGACACTGAAATGGATTCTTGGAAAGATTCTGAAGGCTGTGTTGAAAAGACACCTATAGCTGT
GGGGACATGACTATAATCCCAGCATTTGGGGAGACCGAGGCTGGCAGATCACTTAAGGTCAGGAGTTTGA
GACCAGCCTGGCCAACATGGCGAAACCCCATCTCTGCTAAAAATACAAAAATTAGCTGGGTGCAGTGGTG
CATGCCTGTAGTCCCAGCTACTCAGGAGACTGAGGCGGGAGAATTGTTTGAACCCTGGAGGCAGAGGTTG
TAGTGAGTCGTGATCACACAACTGCACTCCAGCCTGGGCAACAGAACAATACTCCATTCCCTCCCCTCTA
CCCCACCAAAAAAAAAAAAAAATCCTGCCCTTAGATGAGCTCTAGGGCTGCTGAGTACAGTTGTCCCAGT
TGCACAGTGCCCAAGGGTTTGGCATTGCTAAGAAGGCCACGTGCAAATCCTAGATATTGAGTGTTGTATG
TTTGTGACGTTGGTTTCCCGACATGTGAATGGCCCAAGTGTCTGGAAGAAGTGGCGCCACTTTCTAATTT
GCTTGGAGATGTTGCATGTCCCTTAAATTCAGACAGGTGCAGGTAACTGGAGGTTCTGAACCAAAGGTTA
AAATGCAAATTCTCATACAGGGTTGGGAAGTTGTAGCCAGGGATAAGCTTATGTGACTGTTATATGGACT
GAGGAGCAGATGTGAATTTCGAACCATGACATGGCTGAGGGTAGGGGTCGGGTGGATGGATGATTCAGGG
TTGTAACCCATAGAGCCCAAAGGGGAAGTGATCTGTGACCTGGGGTGAGGGTGATCTGGAAGATTTTTGG
ATGGCTGGAAAGAAATGGGGAAGTCGAGCTGCCTGAGAGAGCCAAGTTATTTCCCAAAAGATTCCTTAGG
AGTCTTTCTGTTCAAGACCTCCGTGTGTGTGTGTGTGTGTTTAGGGTTCCCCAGCAATGGCCCAGGCATG
TGAAGGAAACAAGCTTCTTCAGGGAATATTTGTTGAATGAGTTTTCCTGACTCCCAGGCTAGAACTGTTT
TTGCAATTTCCACCCTCTTTTCTTTCCCCCAGAGAACTCCTATTCGTCCTTCAAAACCCATCACGGAAAC
CCCTCTTGGAGAAAACCCTCCTTCCTTCCCCTCAGGACTTTCCCAGCCACCGTCTCTCCTCCAGTCCAGC
CTGATGCCATGGGACTGGGGGTTTCTCTGTCCAGCTCTGTTTCTCCCAGACTGGGGTCTGAGGACTCTCA
GGACCCCCAACTTTACCTAGCACAGGCTGGGCACAAGTGGGTGACAGGGAGTCTACGCCTAGTGGAATTA
TGTATTGGGGCAGGGTCAGTGTGAGAATACACATCCGCATGCATGTCTGTCCATGTCTGTCCGTACCAAC
CTTCCCCTTCCACACGGACCTGGGCACATAGGAGGTGTCTGAGCCTGACACATGGGACAGAGAGTGGACA
TGGCTGAGACACGGACAGAGAAAAGACAAGGAGTCCAGGGGGCTGAAAGCCTTTTGAAATCAGGAAGTTC
CTGTATTGGCAGAACAAAGCCCAGAGAGGAGCAGGGCTTTCCTCAACGCCACCCAGCAAGTGGACACAGA
GCCCGGCCTTGGATGACACCTCCAGGGTTCTGAACCCTGGACCTCGCTTTATGCAAGGAGCTGGCCCCAC
ATTTCCATGAATCGGGGAAACAGCACAAGAAGGTTGGCCTGTGGCAGGGCAAGGGTTAAAGGGGTGACAT
TGAGGGATGCCTCAGAGTCAAAGTCCCCTGACCAAGAGGAATAGAGTAGAAAACACAGAGACAGAGGGTG
AGATCACGCCCCGATGAGGACGGAGAGAGACAGAGATGGAGAGAGACATAGAGGTGGAAATATACAGAGA
AAGATAAATGCAGAGACCAAGGCAGGGAGTGTCGGGGGAAGTAAAGAGGGTGTCCTGAAGAAAGAAGGAT
CTGTTCACTCTTACCAGTCTGTCCTCGAATGATTTGCATAAAATGAGGAGGTGCCTGTCCACACCCCCAA
TTCCTCTCTCAGGCCCCAGAGCCTGAGACCTCACCATGCCCCCATCAGAGATGCAAAAAACTAAACACCC
AACTAGAAATCCTTGGGACCTCTCTCGGCTGGGATCTCAGAGCCTTTCTGTCCCCTACCCCTACCCCATG
TGCTGTCGATTTTGCAGATGGGGACAACCTGGGGCCTCCCGGAACTCTGCCACCCTGGGGAAGTTGGGGG
AGGGCCTTAGTCCCGGATCACAACCCCGTCTGCTCCCCAGAATCCTTTCCTAAGAATCGTTGAGGACCAA
AGTTGTCTTTGCTGACACGTGTTGCTTTTCTCTTTGCCTTTTATTGTTTCAGAGAAAAATCAAGTTGACT
GTGTCAAGTAACACCCCACCCCTTACCCCCGTCCAGCCATAGTGGCTCTCTGGAGACACAGGTCACAGGC
GGAGGGTCCCCTGATCATCCCCAACCACACAGCCAGGGGGACTTGACCCCTGTCCACCCCTGTCTCGTGC
TCCCTCAGACCCCCACAAACCGGCCAAGCAGTCCGGGGAGGCTTCCCCTCCACACAACTCTTAGCATGTG
ATTGCAGATGTGAAATCAAAACGTTGTTTGTTTTTTGTTTTGTTTTGATTCTACCCCGTCGGTCCAGTGT
CTGCACAGACGCCTTCATTTCTCTGTAAATATGTGACTTGGAACAAATGTTTAACACAAACGAGAAGTGG
TCATGAATGCATGGTGTTGAGATGTTTTGCACTATTCTGACTTTTTGGTCTCTGTAAAAATATTTTATTA
ACAGCAGACATTAAAAAAAGAAAAACCACACACA
(SEQ ID NO: 5060 (SOURCE NCBI Reference Sequence NM_001387023.1)

[0203] In various embodiments, an UNC13A mRNA transcript comprises the sequence provided as SEQ ID NO: 5061.

CTGAACCAAGATGGCCGGTGGCGGCCGGGCCCCGGCGTGAGCCAAGCGCGGGCTGCAGCCGGGAGATGCC
CCAGCCCAGCGGCCGCTGAGCCCGACCCGACAGAGCCGGCCCGGCCGCCTCCGGCCCACCTGCGAGCTCG
GAGACATGTCTCTGCTTTGCGTTGGAGAGAAATTCAACACGTACGTGACCCTGAAAGTGCAGAATGTCAA
GAGCACGACCATCGCGGTGCGGGGCAGCCAGCCCAGCTGGGAGCAGGATTTCATGTTCGAGATTAACCGT
CTGGATTTGGGACTGACGGTGGAGGTGTGGAATAAGGGTCTCATCTGGGACACAATGGTGGGCACTGTGT
GGATCCCACTGAGGACCATCCGCCAGTCCAATGAGGAGGGCCCTGGAGAGTGGCTGACGCTGGACTCCCA
GGTCATCATGGCAGACAGTGAGATCTGTGGCACCAAGGACCCCACCTTCCACCGCATCCTCCTGGACACG
CGCTTTGAGCTACCCTTAGACATTCCTGAAGAGGAGGCTCGCTACTGGGCCAAGAAGCTGGAGCAGCTCA
ATGCTATGCGGGACCAGGATGAATATTCGTTCCAAGATGAGCAAGACAAGCCTCTGCCTGTCCCCAGCAA
CCAGTGCTGCAACTGGAATTATTTTGGCTGGGGTGAGCAGCACAACGATGACCCCGACAGTGCAGTGGAT
GATCGTGACAGTGACTACCGCAGTGAAACGAGCAACAGCATCCCGCCGCCCTATTATACTACGTCACAAC
CCAACGCCTCAGTCCACCAATATTCTGTTCGCCCACCACCCCTGGGCTCCCGGGAGTCCTACAGTGACTC
CATGCACAGTTACGAGGAGTTCTCTGAGCCACAAGCCCTCAGCCCCACGGGTAGCAGCCGCTATGCCTCT
TCCGGGGAGCTGAGCCAGGGAAGCTCTCAGCTGAGCGAGGACTTCGACCCTGACGAGCACAGCCTGCAGG
GCTCCGACATGGAGGATGAGCGGGACCGGGACTCCTACCACTCCTGCCACAGCTCGGTCAGCTACCACAA
AGACTCGCCTCGCTGGGACCAGGATGAGGAAGAGCTGGAGGAGGACCTGGAGGACTTCCTGGAGGAGGAG
GAGCTGCCTGAAGATGAGGAGGAGCTGGAGGAGGAGGAGGAGGAGGTGCCTGACGATTTGGGCAGCTATG
CCCAGCGTGAAGACGTAGCTGTGGCTGAGCCCAAAGACTTCAAACGCATCAGCCTCCCGCCAGCTGCCCC
AGGGAAGGAGGACAAGGCCCCAGTGGCACCCACCGAGGCCCCCGACATGGCCAAGGTGGCCCCCAAGCCA
GCCACGCCCGACAAGGTGCCTGCAGCTGAGCAGATCCCTGAGGCTGAGCCACCCAAGGACGAGGAGAGTT
TCAGGCCGAGAGAGGATGAGGAAGGCCAGGAGGGGCAGGACTCCATGTCCAGGGCCAAGGCCAACTGGCT
GCGTGCCTTCAACAAGGTGCGGATGCAGCTGCAGGAGGCCCGGGGAGAAGGAGAGATGTCTAAATCCCTA
TGGTTCAAAGGCGGCCCAGGGGGCGGTCTCATCATCATCGACAGCATGCCAGACATCCGCAAGAGGAAAC
CTATCCCACTCGTGAGCGACTTGGCCATGTCCCTGGTCCAGTCCAGGAAAGCGGGCATCACCTCGGCCTT
GGCCTCCAGCACGTTGAACAACGAGGAGCTGAAAAACCACGTTTACAAGAAGACCCTGCAAGCCTTAATC
TACCCCATCTCGTGCACGACGCCACACAACTTCGAAGTGTGGACGGCCACCACGCCCACCTACTGCTACG
AGTGCGAGGGGCTGCTGTGGGGCATCGCGAGGCAGGGCATGCGCTGCACCGAGTGCGGTGTCAAGTGCCA
CGAGAAGTGCCAGGACCTGCTCAACGCCGACTGCCTGCAGCGGGCTGCGGAGAAGAGCTCCAAGCACGGG
GCGGAGGACCGGACACAGAACATCATCATGGTGCTCAAGGACCGCATGAAGATCCGGGAGCGCAACAAGC
CCGAGATCTTCGAGCTCATCCAGGAGATCTTCGCGGTGACCAAGACGGCGCACACGCAGCAGATGAAGGC
GGTCAAGCAGAGCGTGCTGGACGGCACGTCCAAGTGGTCCGCCAAGATCAGCATCACCGTGGTCTGCGCC
CAGGGCTTGCAGGCAAAGGACAAGACAGGATCCAGTGACCCCTATGTCACCGTCCAGGTCGGGAAGACCA
AGAAACGGACAAAAACCATCTATGGGAACCTCAACCCGGTGTGGGAGGAGAATTTCCACTTTGAATGTCA
CAATTCCTCCGACCGCATCAAGGTGCGCGTCTGGGACGAGGATGACGACATCAAATCCCGCGTGAAACAG
AGGTTCAAGAGGGAATCTGACGATTTCCTGGGGCAGACGATCATTGAGGTGCGGACGCTCAGCGGCGAGA
TGGACGTGTGGTACAACCTGGACAAGCGAACTGACAAATCTGCCGTGTCGGGTGCCATCCGGCTCCACAT
CAGTGTGGAGATCAAAGGCGAGGAGAAGGTGGCCCCGTACCATGTCCAGTACACCTGTCTGCATGAGAAC
CTGTTCCACTTCGTGACCGACGTGCAGAACAATGGGGTCGTGAAGATCCCAGATGCCAAGGGTGACGATG
CCTGGAAGGTTTACTACGATGAGACAGCCCAGGAGATTGTGGACGAGTTTGCCATGCGCTACGGCGTCGA
GTCCATCTACCAAGCCATGACCCACTTTGCCTGCCTCTCCTCCAAGTATATGTGCCCAGGGGTGCCTGCC
GTCATGAGCACCCTGCTCGCCAACATCAATGCCTACTACGCACACACCACCGCCTCCACCAACGTGTCTG
CCTCCGACCGCTTCGCCGCCTCCAACTTTGGGAAAGAGCGCTTCGTGAAACTCCTGGACCAGCTGCATAA
CTCCCTGCGGATTGACCTCTCCATGTACCGGAATAACTTCCCAGCCAGCAGCCCGGAGAGACTCCAGGAC
CTCAAATCCACTGTGGACCTTCTCACCAGCATCACCTTCTTTCGGATGAAGGTACAAGAACTCCAGAGCC
CGCCCCGAGCCAGCCAGGTGGTAAAGGACTGTGTGAAAGCCTGCCTTAATTCTACCTACGAGTACATCTT
CAATAACTGCCATGAACTGTACAGCCGGGAGTACCAGACAGACCCGGCCAAGAAGGGGGAAGTTCTCCCA
GAGGAACAGGGGCCCAGCATCAAGAACCTCGACTTCTGGTCCAAGCTGATTACCCTCATAGTGTCCATCA
TTGAGGAAGACAAGAATTCCTACACTCCCTGCCTCAACCAGTTTCCCCAGGAGCTGAATGTGGGTAAAAT
CAGCGCTGAAGTGATGTGGAATCTGTTTGCCCAAGACATGAAGTACGCCATGGAGGAGCACGACAAGCAT
CGTCTATGCAAGAGTGCCGACTACATGAACCTCCACTTCAAGGTGAAATGGCTCTACAATGAGTATGTGA
CGGAACTTCCCGCCTTCAAGGACCGCGTGCCTGAGTACCCTGCATGGTTTGAACCCTTCGTCATCCAGTG
GCTGGATGAGAATGAGGAGGTGTCCCGGGATTTCCTGCACGGTGCCCTGGAGCGAGACAAGAAGGATGGG
TTCCAGCAGACCTCAGAGCATGCCCTATTCTCCTGCTCCGTGGTGGATGTTTTCTCCCAACTCAACCAGA
GCTTTGAAATCATCAAGAAACTCGAGTGTCCCGACCCTCAGATCGTGGGGCACTACATGAGGCGCTTTGC
CAAGACCATCAGTAATGTGCTCCTCCAGTATGCAGACATCATCTCCAAGGACTTTGCCTCCTACTGCTCC
AAGGAGAAGGAGAAAGTGCCCTGCATTCTCATGAATAACACTCAACAGCTACGAGTTCAGCTGGAGAAGA
TGTTCGAAGCCATGGGAGGAAAGGAGCTGGATGCTGAAGCCAGTGACATCCTGAAGGAGCTTCAGGTGAA
ACTCAATAACGTCTTGGATGAGCTCAGCCGGGTGTTTGCTACCAGCTTCCAGCCGCACATTGAAGAGTGT
GTCAAACAGATGGGTGACATCCTTAGCCAGGTTAAGGGCACAGGCAATGTGCCAGCCAGTGCCTGCAGCA
GCGTGGCCCAGGACGCGGACAATGTGTTGCAGCCCATCATGGACCTGCTGGACAGCAACCTGACCCTCTT
TGCCAAAATCTGTGAGAAGACTGTGCTGAAGCGAGTGCTGAAGGAGCTGTGGAAGCTGGTTATGAACACC
ATGGAGAAAACCATCGTCCTGCCGCCCCTCACTGACCAGACGATGATCGGGAACCTCTTGAGAAAACATG
GCAAGGGATTAGAAAAGGGCAGGGTGAAATTGCCAAGCCACTCAGACGGAACCCAGATGATCTTCAATGC
AGCCAAGGAGCTGGGTCAGCTGTCCAAACTCAAGGATCACATGGTACGAGAAGAAGCCAAGAGCTTGACC
CCAAAGCAGTGCGCGGTTGTTGAGTTGGCCCTGGACACCATCAAGCAATATTTCCACGCGGGTGGCGTGG
GCCTCAAGAAGACCTTCCTGGAGAAGAGCCCGGACCTGCAATCCTTGCGCTATGCCCTGTCGCTCTACAC
GCAGGCCACCGACCTGCTAATCAAGACCTTTGTACAGACGCAATCGGCCCAGGGCTTGGGTGTAGAAGAC
CCTGTGGGTGAAGTCTCTGTCCATGTTGAGCTGTTCACTCATCCAGGAACTGGGGAACACAAGGTCACAG
TGAAAGTGGTGGCTGCCAATGACCTCAAGTGGCAGACTTCTGGCATCTTCCGGCCGTTCATCGAGGTCAA
CATCATTGGGCCCCAGCTCAGCGACAAGAAACGCAAGTTTGCGACCAAATCCAAGAACAATAGCTGGGCT
CCCAAGTACAATGAGAGCTTCCAGTTCACGCTGAGCGCCGACGCGGGTCCCGAGTGCTATGAGCTGCAGG
TGTGCGTCAAGGACTACTGCTTCGCGCGCGAGGACCGCACGGTGGGGCTGGCCGTGCTGCAGCTGCGTGA
GCTGGCCCAGCGCGGGAGCGCCGCCTGCTGGCTGCCGCTCGGCCGCCGCATCCACATGGACGACACGGGC
CTCACGGTGCTGCGAATCCTCTCGCAGCGCAGCAACGACGAGGTGGCCAAGGAGTTCGTGAAGCTCAAGT
CGGACACGCGCTCCGCCGAGGAGGGCGGTGCCGCGCCTGCGCCTTAGCGCGGGCGGTCGGCCGAGCGGCA
CTGCGCCTGCGCGGAGGGCGCTGGGCGGGGAGGGACGGGGCTTGCGCCTTGGTGGGACCTCCCCAGGGGC
GGGGCTCGGGGGGCTCCACGCCAAGGGTGGGCTGCGCCTACGCCCTTGACTCAGCTTTCCCTTTTGGGGA
ATTAGGAATGGAGGATGCCCCGCCCTCTCGGGAGGCCACGCCCAAGGGCGCGACGAAGGAAGGAGCCACA
TCCCCAACTTGAGGCCACGCCCCCAGCACCTAGGGGGCATTTTGAGCTGGGATGGGGGAAACCTCGTCCC
TATGGAGGAGGCCACATCCCGGGGCTCTGGTACCGGGAGGCACCACCTCATGTCCCCTGGAAAAGCCATA
AGATGGGACCCAGACCCCTGGGACCCCAGACCAATTGCCAAGTATGGAAATCTCAGCTCCCTCGAGGGGG
GGCCCTGGGCAAGGGGTAGGGCTCTCTGGAGCGCCCCTCTAGGTGGCCTGGGGACTGGAGGGACCAGGAT
GCTGGTTGGAGGGCCCCGGAATACCGGAGTCCCTTTAGATATTTGTGCAAAAAATAAATGGGGGGAGGGG
GGAGGATGGGATTTCAAAAGCACATGCGCCCTTGGGCGCCCAAACCCTGGGGGCCGAGGGGACGGCTCTG
GTTCCCCACGCTGCCCCTACTTCCCTTTGGGAGTTTGCCTCTCCCTCTCCCCCAACAAACCCAGTCCTCA
TATCATAGAGTTCAACACACCCATTTGACAGATGGCAAAACTGAGGCTTAAAGAGCTGCTTGAGACTTGG
CCAAGGTTCCAGGTGCCATACCCTCTGTGCCCCTCCCTTAGGCCTGTGTGCCCCATGGAAGGGTGGGCTG
AGATCGGGATGACCTGACACAGCTCCCTATTGCTGCTAATTCCCCCTCGGCCTCCTCCAAGGGGTGGGAA
TTCCAGGCCAAGACCCCTACTTCGCCTTTCCTTCTCCGGCTGCCAAGCAGGACCTTTGCCCTCAGCCCTT
TCTCCTGGGATCTCCATGGGGGATGCCATGAGGGCCTCCCACCACAAAAGAGAATTTGGGATCCCCTGGT
CCCAGGTTTCTCCATCCCTTCTTCCTTTTCCAGAATTTTCCAAATAGGAAAGAACAGAAGGAGACCAGAA
ACTCTAGGGGGGAGAAAGAGAATGAGAGAAAGAGAATGAGAGAGAGAGAAACACAAACACAGTGACACAG
TGAGAGCTTAGTCTCCAAGAGCCTATTCATTGATTCAAACACCCAAGCCACAGGATACCTCAGATGGCCC
TCTTGCCAGCTGGAAGCTCTTTCTCCAATGAGCAAAGTTACAGTGACCTGGCTGGAGTTACCTGGTGCAC
ATAGGACCTTAGGGGAAAGTTCAGCGTGGACTACACTTGCTCTGGGATCTGCTTTTCCACATGTGTGTAT
GGCACGCCTTTTTCTGCTGGATTGGGAAGGACAAGATTTTGCTGTGCTAGGGAGAAATGAAAACGGGGTG
AGCTGAGTAGCTGGGTTTCTGGAGGATAGAACATCAGATGGGGAGGCTTTCCGAGGTGAAGAATGAGAGG
GAACCACTTACTAGAGAGAAAAGAGCTCCAGGCCTGGGGAACAGCACGTGCGAAGGCCAGGAGAGAAGAA
CTGTTGAAACAACGAGAAGGGTGGCACGGCTGGAGCTGAGCCAGCAAGGGGGATCGTGAGGAGCCTTGGG
GTTGGGGAGATCTGCAGAAGCATCAGACCAGGCAGGGCCTCGTACGCAGTCCTGAGGAGTTTTACTTTTA
TTCTAAGACAGTTGGGGAGCTCCAGGAGCTGTTTTAAGTTGGGGAGAGACTGGATTCCAGCCTGCAAAAG
CTGTTTTGTGAAGACTAAAACCAGTGAGGAGAGGTGGAGGTGCTTTGGGGACACTGAAATGGATTCTTGG
AAAGATTCTGAAGGCTGTGTTGAAAAGACACCTATAGCTGTGGGGACATGACTATAATCCCAGCATTTGG
GGAGACCGAGGCTGGCAGATCACTTAAGGTCAGGAGTTTGAGACCAGCCTGGCCAACATGGCGAAACCCC
ATCTCTGCTAAAAATACAAAAATTAGCTGGGTGCAGTGGTGCATGCCTGTAGTCCCAGCTACTCAGGAGA
CTGAGGCGGGAGAATTGTTTGAACCCTGGAGGCAGAGGTTGTAGTGAGTCGTGATCACACAACTGCACTC
CAGCCTGGGCAACAGAACAATACTCCATTCCCTCCCCTCTACCCCACCAAAAAAAAAAAAAAATCCTGCC
CTTAGATGAGCTCTAGGGCTGCTGAGTACAGTTGTCCCAGTTGCACAGTGCCCAAGGGTTTGGCATTGCT
AAGAAGGCCACGTGCAAATCCTAGATATTGAGTGTTGTATGTTTGTGACGTTGGTTTCCCGACATGTGAA
TGGCCCAAGTGTCTGGAAGAAGTGGCGCCACTTTCTAATTTGCTTGGAGATGTTGCATGTCCCTTAAATT
CAGACAGGTGCAGGTAACTGGAGGTTCTGAACCAAAGGTTAAAATGCAAATTCTCATACAGGGTTGGGAA
GTTGTAGCCAGGGATAAGCTTATGTGACTGTTATATGGACTGAGGAGCAGATGTGAATTTCGAACCATGA
CATGGCTGAGGGTAGGGGTCGGGTGGATGGATGATTCAGGGTTGTAACCCATAGAGCCCAAAGGGGAAGT
GATCTGTGACCTGGGGTGAGGGTGATCTGGAAGATTTTTGGATGGCTGGAAAGAAATGGGGAAGTCGAGC
TGCCTGAGAGAGCCAAGTTATTTCCCAAAAGATTCCTTAGGAGTCTTTCTGTTCAAGACCTCCGTGTGTG
TGTGTGTGTGTTTAGGGTTCCCCAGCAATGGCCCAGGCATGTGAAGGAAACAAGCTTCTTCAGGGAATAT
TTGTTGAATGAGTTTTCCTGACTCCCAGGCTAGAACTGTTTTTGCAATTTCCACCCTCTTTTCTTTCCCC
CAGAGAACTCCTATTCGTCCTTCAAAACCCATCACGGAAACCCCTCTTGGAGAAAACCCTCCTTCCTTCC
CCTCAGGACTTTCCCAGCCACCGTCTCTCCTCCAGTCCAGCCTGATGCCATGGGACTGGGGGTTTCTCTG
TCCAGCTCTGTTTCTCCCAGACTGGGGTCTGAGGACTCTCAGGACCCCCAACTTTACCTAGCACAGGCTG
GGCACAAGTGGGTGACAGGGAGTCTACGCCTAGTGGAATTATGTATTGGGGCAGGGTCAGTGTGAGAATA
CACATCCGCATGCATGTCTGTCCATGTCTGTCCGTACCAACCTTCCCCTTCCACACGGACCTGGGCACAT
AGGAGGTGTCTGAGCCTGACACATGGGACAGAGAGTGGACATGGCTGAGACACGGACAGAGAAAAGACAA
GGAGTCCAGGGGGCTGAAAGCCTTTTGAAATCAGGAAGTTCCTGTATTGGCAGAACAAAGCCCAGAGAGG
AGCAGGGCTTTCCTCAACGCCACCCAGCAAGTGGACACAGAGCCCGGCCTTGGATGACACCTCCAGGGTT
CTGAACCCTGGACCTCGCTTTATGCAAGGAGCTGGCCCCACATTTCCATGAATCGGGGAAACAGCACAAG
AAGGTTGGCCTGTGGCAGGGCAAGGGTTAAAGGGGTGACATTGAGGGATGCCTCAGAGTCAAAGTCCCCT
GACCAAGAGGAATAGAGTAGAAAACACAGAGACAGAGGGTGAGATCACGCCCCGATGAGGACGGAGAGAG
ACAGAGATGGAGAGAGACATAGAGGTGGAAATATACAGAGAAAGATAAATGCAGAGACCAAGGCAGGGAG
TGTCGGGGGAAGTAAAGAGGGTGTCCTGAAGAAAGAAGGATCTGTTCACTCTTACCAGTCTGTCCTCGAA
TGATTTGCATAAAATGAGGAGGTGCCTGTCCACACCCCCAATTCCTCTCTCAGGCCCCAGAGCCTGAGAC
CTCACCATGCCCCCATCAGAGATGCAAAAAACTAAACACCCAACTAGAAATCCTTGGGACCTCTCTCGGC
TGGGATCTCAGAGCCTTTCTGTCCCCTACCCCTACCCCATGTGCTGTCGATTTTGCAGATGGGGACAACC
TGGGGCCTCCCGGAACTCTGCCACCCTGGGGAAGTTGGGGGAGGGCCTTAGTCCCGGATCACAACCCCGT
CTGCTCCCCAGAATCCTTTCCTAAGAATCGTTGAGGACCAAAGTTGTCTTTGCTGACACGTGTTGCTTTT
CTCTTTGCCTTTTATTGTTTCAGAGAAAAATCAAGTTGACTGTGTCAAGTAACACCCCACCCCTTACCCC
CGTCCAGCCATAGTGGCTCTCTGGAGACACAGGTCACAGGCGGAGGGTCCCCTGATCATCCCCAACCACA
CAGCCAGGGGGACTTGACCCCTGTCCACCCCTGTCTCGTGCTCCCTCAGACCCCCACAAACCGGCCAAGC
AGTCCGGGGAGGCTTCCCCTCCACACAACTCTTAGCATGTGATTGCAGATGTGAAATCAAAACGTTGTTT
GTTTTTTGTTTTGTTTTGATTCTACCCCGTCGGTCCAGTGTCTGCACAGACGCCTTCATTTCTCTGTAAA
TATGTGACTTGGAACAAATGTTTAACACAAACGAGAAGTGGTCATGAATGCATGGTGTTGAGATGTTTTG
CACTATTCTGACTTTTTGGTCTCTGTAAAAATATTTTATTAACAGCAGACATTAAAAAAAGAAAAACCAC
ACACAGCCTTGGA
(SEQ ID NO: 5061 (SOURCE NCBI Reference Sequence XM_011527810.2)).

[0204] In various embodiments, an UNC13A mRNA transcript comprises the sequence provided as SEQ ID NO: 5062.

CTGAACCAAGATGGCCGGTGGCGGCCGGGCCCCGGCGTGAGCCAAGCGCGGGCTGCAGCCGGGAGATGCC
CCAGCCCAGCGGCCGCTGAGCCCGACCCGACAGAGCCGGCCCGGCCGCCTCCGGCCCACCTGCGAGCTCG
GAGACATGTCTCTGCTTTGCGTTGGAGTCAAAAAAGCCAAGTTTGATGGTGCCCAAGAGAAATTCAACAC
GTACGTGACCCTGAAAGTGCAGAATGTCAAGAGCACGACCATCGCGGTGCGGGGCAGCCAGCCCAGCTGG
GAGCAGGATTTCATGTTCGAGATTAACCGTCTGGATTTGGGACTGACGGTGGAGGTGTGGAATAAGGGTC
TCATCTGGGACACAATGGTGGGCACTGTGTGGATCCCACTGAGGACCATCCGCCAGTCCAATGAGGAGGG
CCCTGGAGAGTGGCTGACGCTGGACTCCCAGGTCATCATGGCAGACAGTGAGATCTGTGGCACCAAGGAC
CCCACCTTCCACCGCATCCTCCTGGACACGCGCTTTGAGCTACCCTTAGACATTCCTGAAGAGGAGGCTC
GCTACTGGGCCAAGAAGCTGGAGCAGCTCAATGCTATGCGGGACCAGGATGAATATTCGTTCCAAGATGA
GCAAGACAAGCCTCTGCCTGTCCCCAGCAACCAGTGCTGCAACTGGAATTATTTTGGCTGGGGTGAGCAG
CACAACGATGACCCCGACAGTGCAGTGGATGATCGTGACAGTGACTACCGCAGTGAAACGAGCAACAGCA
TCCCGCCGCCCTATTATACTACGTCACAACCCAACGCCTCAGTCCACCAATATTCTGTTCGCCCACCACC
CCTGGGCTCCCGGGAGTCCTACAGTGACTCCATGCACAGTTACGAGGAGTTCTCTGAGCCACAAGCCCTC
AGCCCCACGGGTAGCAGCCGCTATGCCTCTTCCGGGGAGCTGAGCCAGGGAAGCTCTCAGCTGAGCGAGG
ACTTCGACCCTGACGAGCACAGCCTGCAGGGCTCCGACATGGAGGATGAGCGGGACCGGGACTCCTACCA
CTCCTGCCACAGCTCGGTCAGCTACCACAAAGACTCGCCTCGCTGGGACCAGGATGAGGAAGAGCTGGAG
GAGGACCTGGAGGACTTCCTGGAGGAGGAGGAGCTGCCTGAAGATGAGGAGGAGCTGGAGGAGGAGGAGG
AGGAGGTGCCTGACGATTTGGGCAGCTATGCCCAGCGTGAAGACGTAGCTGTGGCTGAGCCCAAAGACTT
CAAACGCATCAGCCTCCCGCCAGCTGCCCCAGGGAAGGAGGACAAGGCCCCAGTGGCACCCACCGAGGCC
CCCGACATGGCCAAGGTGGCCCCCAAGCCAGCCACGCCCGACAAGGTGCCTGCAGCTGAGCAGATCCCTG
AGGCTGAGCCACCCAAGGACGAGGAGAGTTTCAGGCCGAGAGAGGATGAGGAAGGCCAGGAGGGGCAGGA
CTCCATGTCCAGGGCCAAGGCCAACTGGCTGCGTGCCTTCAACAAGGTGCGGATGCAGCTGCAGGAGGCC
CGGGGAGAAGGAGAGATGTCTAAATCCCTATGGTTCAAAGGCGGCCCAGGGGGCGGTCTCATCATCATCG
ACAGCATGCCAGACATCCGCAAGAGGAAACCTATCCCACTCGTGAGCGACTTGGCCATGTCCCTGGTCCA
GTCCAGGAAAGCGGGCATCACCTCGGCCTTGGCCTCCAGCACGTTGAACAACGAGGAGCTGAAAAACCAC
GTTTACAAGAAGACCCTGCAAGCCTTAATCTACCCCATCTCGTGCACGACGCCACACAACTTCGAAGTGT
GGACGGCCACCACGCCCACCTACTGCTACGAGTGCGAGGGGCTGCTGTGGGGCATCGCGAGGCAGGGCAT
GCGCTGCACCGAGTGCGGTGTCAAGTGCCACGAGAAGTGCCAGGACCTGCTCAACGCCGACTGCCTGCAG
CGGGCTGCGGAGAAGAGCTCCAAGCACGGGGCGGAGGACCGGACACAGAACATCATCATGGTGCTCAAGG
ACCGCATGAAGATCCGGGAGCGCAACAAGCCCGAGATCTTCGAGCTCATCCAGGAGATCTTCGCGGTGAC
CAAGACGGCGCACACGCAGCAGATGAAGGCGGTCAAGCAGAGCGTGCTGGACGGCACGTCCAAGTGGTCC
GCCAAGATCAGCATCACCGTGGTCTGCGCCCAGGGCTTGCAGGCAAAGGACAAGACAGGATCCAGTGACC
CCTATGTCACCGTCCAGGTCGGGAAGACCAAGAAACGGACAAAAACCATCTATGGGAACCTCAACCCGGT
GTGGGAGGAGAATTTCCACTTTGAATGTCACAATTCCTCCGACCGCATCAAGGTGCGCGTCTGGGACGAG
GATGACGACATCAAATCCCGCGTGAAACAGAGGTTCAAGAGGGAATCTGACGATTTCCTGGGGCAGACGA
TCATTGAGGTGCGGACGCTCAGCGGCGAGATGGACGTGTGGTACAACCTGGACAAGCGAACTGACAAATC
TGCCGTGTCGGGTGCCATCCGGCTCCACATCAGTGTGGAGATCAAAGGCGAGGAGAAGGTGGCCCCGTAC
CATGTCCAGTACACCTGTCTGCATGAGAACCTGTTCCACTTCGTGACCGACGTGCAGAACAATGGGGTCG
TGAAGATCCCAGATGCCAAGGGTGACGATGCCTGGAAGGTTTACTACGATGAGACAGCCCAGGAGATTGT
GGACGAGTTTGCCATGCGCTACGGCGTCGAGTCCATCTACCAAGCCATGACCCACTTTGCCTGCCTCTCC
TCCAAGTATATGTGCCCAGGGGTGCCTGCCGTCATGAGCACCCTGCTCGCCAACATCAATGCCTACTACG
CACACACCACCGCCTCCACCAACGTGTCTGCCTCCGACCGCTTCGCCGCCTCCAACTTTGGGAAAGAGCG
CTTCGTGAAACTCCTGGACCAGCTGCATAACTCCCTGCGGATTGACCTCTCCATGTACCGGAATAACTTC
CCAGCCAGCAGCCCGGAGAGACTCCAGGACCTCAAATCCACTGTGGACCTTCTCACCAGCATCACCTTCT
TTCGGATGAAGGTACAAGAACTCCAGAGCCCGCCCCGAGCCAGCCAGGTGGTAAAGGACTGTGTGAAAGC
CTGCCTTAATTCTACCTACGAGTACATCTTCAATAACTGCCATGAACTGTACAGCCGGGAGTACCAGACA
GACCCGGCCAAGAAGGGGGAAGTTCTCCCAGAGGAACAGGGGCCCAGCATCAAGAACCTCGACTTCTGGT
CCAAGCTGATTACCCTCATAGTGTCCATCATTGAGGAAGACAAGAATTCCTACACTCCCTGCCTCAACCA
GTTTCCCCAGGAGCTGAATGTGGGTAAAATCAGCGCTGAAGTGATGTGGAATCTGTTTGCCCAAGACATG
AAGTACGCCATGGAGGAGCACGACAAGCATCGTCTATGCAAGAGTGCCGACTACATGAACCTCCACTTCA
AGGTGAAATGGCTCTACAATGAGTATGTGACGGAACTTCCCGCCTTCAAGGACCGCGTGCCTGAGTACCC
TGCATGGTTTGAACCCTTCGTCATCCAGTGGCTGGATGAGAATGAGGAGGTGTCCCGGGATTTCCTGCAC
GGTGCCCTGGAGCGAGACAAGAAGGATGGGTTCCAGCAGACCTCAGAGCATGCCCTATTCTCCTGCTCCG
TGGTGGATGTTTTCTCCCAACTCAACCAGAGCTTTGAAATCATCAAGAAACTCGAGTGTCCCGACCCTCA
GATCGTGGGGCACTACATGAGGCGCTTTGCCAAGACCATCAGTAATGTGCTCCTCCAGTATGCAGACATC
ATCTCCAAGGACTTTGCCTCCTACTGCTCCAAGGAGAAGGAGAAACCCTGCATTCTCATGAATAACACTC
AACAGCTACGAGTTCAGCTGGAGAAGATGTTCGAAGCCATGGGAGGAAAGGAGCTGGATGCTGAAGCCAG
TGACATCCTGAAGGAGCTTCAGGTGAAACTCAATAACGTCTTGGATGAGCTCAGCCGGGTGTTTGCTACC
AGCTTCCAGCCGCACATTGAAGAGTGTGTCAAACAGATGGGTGACATCCTTAGCCAGGTTAAGGGCACAG
GCAATGTGCCAGCCAGTGCCTGCAGCAGCGTGGCCCAGGACGCGGACAATGTGTTGCAGCCCATCATGGA
CCTGCTGGACAGCAACCTGACCCTCTTTGCCAAAATCTGTGAGAAGACTGTGCTGAAGCGAGTGCTGAAG
GAGCTGTGGAAGCTGGTTATGAACACCATGGAGAAAACCATCGTCCTGCCGCCCCTCACTGACCAGACGA
TGATCGGGAACCTCTTGAGAAAACATGGCAAGGGATTAGAAAAGGGCAGGGTGAAATTGCCAAGCCACTC
AGACGGAACCCAGATGATCTTCAATGCAGCCAAGGAGCTGGGTCAGCTGTCCAAACTCAAGGATCACATG
GTACGAGAAGAAGCCAAGAGCTTGACCCCAAAGCAGTGCGCGGTTGTTGAGTTGGCCCTGGACACCATCA
AGCAATATTTCCACGCGGGTGGCGTGGGCCTCAAGAAGACCTTCCTGGAGAAGAGCCCGGACCTGCAATC
CTTGCGCTATGCCCTGTCGCTCTACACGCAGGCCACCGACCTGCTAATCAAGACCTTTGTACAGACGCAA
TCGGCCCAGGGCTTGGGTGTAGAAGACCCTGTGGGTGAAGTCTCTGTCCATGTTGAGCTGTTCACTCATC
CAGGAACTGGGGAACACAAGGTCACAGTGAAAGTGGTGGCTGCCAATGACCTCAAGTGGCAGACTTCTGG
CATCTTCCGGCCGTTCATCGAGGTCAACATCATTGGGCCCCAGCTCAGCGACAAGAAACGCAAGTTTGCG
ACCAAATCCAAGAACAATAGCTGGGCTCCCAAGTACAATGAGAGCTTCCAGTTCACGCTGAGCGCCGACG
CGGGTCCCGAGTGCTATGAGCTGCAGGTGTGCGTCAAGGACTACTGCTTCGCGCGCGAGGACCGCACGGT
GGGGCTGGCCGTGCTGCAGCTGCGTGAGCTGGCCCAGCGCGGGAGCGCCGCCTGCTGGCTGCCGCTCGGC
CGCCGCATCCACATGGACGACACGGGCCTCACGGTGCTGCGAATCCTCTCGCAGCGCAGCAACGACGAGG
TGGCCAAGGAGTTCGTGAAGCTCAAGTCGGACACGCGCTCCGCCGAGGAGGGCGGTGCCGCGCCTGCGCC
TTAGCGCGGGCGGTCGGCCGAGCGGCACTGCGCCTGCGCGGAGGGCGCTGGGGGGGGAGGGACGGGGCTT
GCGCCTTGGTGGGACCTCCCCAGGGGCGGGGCTCGGGGGGCTCCACGCCAAGGGTGGGCTGCGCCTACGC
CCTTGACTCAGCTTTCCCTTTTGGGGAATTAGGAATGGAGGATGCCCCGCCCTCTCGGGAGGCCACGCCC
AAGGGCGCGACGAAGGAAGGAGCCACATCCCCAACTTGAGGCCACGCCCCCAGCACCTAGGGGGCATTTT
GAGCTGGGATGGGGGAAACCTCGTCCCTATGGAGGAGGCCACATCCCGGGGCTCTGGTACCGGGAGGCAC
CACCTCATGTCCCCTGGAAAAGCCATAAGATGGGACCCAGACCCCTGGGACCCCAGACCAATTGCCAAGT
ATGGAAATCTCAGCTCCCTCGAGGGGGGGCCCTGGGCAAGGGGTAGGGCTCTCTGGAGCGCCCCTCTAGG
TGGCCTGGGGACTGGAGGGACCAGGATGCTGGTTGGAGGGCCCCGGAATACCGGAGTCCCTTTAGATATT
TGTGCAAAAAATAAATGGGGGGAGGGGGGAGGATGGGATTTCAAAAGCACATGCGCCCTTGGGCGCCCAA
ACCCTGGGGGCCGAGGGGACGGCTCTGGTTCCCCACGCTGCCCCTACTTCCCTTTGGGAGTTTGCCTCTC
CCTCTCCCCCAACAAACCCAGTCCTCATATCATAGAGTTCAACACACCCATTTGACAGATGGCAAAACTG
AGGCTTAAAGAGCTGCTTGAGACTTGGCCAAGGTTCCAGGTGCCATACCCTCTGTGCCCCTCCCTTAGGC
CTGTGTGCCCCATGGAAGGGTGGGCTGAGATCGGGATGACCTGACACAGCTCCCTATTGCTGCTAATTCC
CCCTCGGCCTCCTCCAAGGGGTGGGAATTCCAGGCCAAGACCCCTACTTCGCCTTTCCTTCTCCGGCTGC
CAAGCAGGACCTTTGCCCTCAGCCCTTTCTCCTGGGATCTCCATGGGGGATGCCATGAGGGCCTCCCACC
ACAAAAGAGAATTTGGGATCCCCTGGTCCCAGGTTTCTCCATCCCTTCTTCCTTTTCCAGAATTTTCCAA
ATAGGAAAGAACAGAAGGAGACCAGAAACTCTAGGGGGGAGAAAGAGAATGAGAGAAAGAGAATGAGAGA
GAGAGAAACACAAACACAGTGACACAGTGAGAGCTTAGTCTCCAAGAGCCTATTCATTGATTCAAACACC
CAAGCCACAGGATACCTCAGATGGCCCTCTTGCCAGCTGGAAGCTCTTTCTCCAATGAGCAAAGTTACAG
TGACCTGGCTGGAGTTACCTGGTGCACATAGGACCTTAGGGGAAAGTTCAGCGTGGACTACACTTGCTCT
GGGATCTGCTTTTCCACATGTGTGTATGGCACGCCTTTTTCTGCTGGATTGGGAAGGACAAGATTTTGCT
GTGCTAGGGAGAAATGAAAACGGGGTGAGCTGAGTAGCTGGGTTTCTGGAGGATAGAACATCAGATGGGG
AGGCTTTCCGAGGTGAAGAATGAGAGGGAACCACTTACTAGAGAGAAAAGAGCTCCAGGCCTGGGGAACA
GCACGTGCGAAGGCCAGGAGAGAAGAACTGTTGAAACAACGAGAAGGGTGGCACGGCTGGAGCTGAGCCA
GCAAGGGGGATCGTGAGGAGCCTTGGGGTTGGGGAGATCTGCAGAAGCATCAGACCAGGCAGGGCCTCGT
ACGCAGTCCTGAGGAGTTTTACTTTTATTCTAAGACAGTTGGGGAGCTCCAGGAGCTGTTTTAAGTTGGG
GAGAGACTGGATTCCAGCCTGCAAAAGCTGTTTTGTGAAGACTAAAACCAGTGAGGAGAGGTGGAGGTGC
TTTGGGGACACTGAAATGGATTCTTGGAAAGATTCTGAAGGCTGTGTTGAAAAGACACCTATAGCTGTGG
GGACATGACTATAATCCCAGCATTTGGGGAGACCGAGGCTGGCAGATCACTTAAGGTCAGGAGTTTGAGA
CCAGCCTGGCCAACATGGCGAAACCCCATCTCTGCTAAAAATACAAAAATTAGCTGGGTGCAGTGGTGCA
TGCCTGTAGTCCCAGCTACTCAGGAGACTGAGGCGGGAGAATTGTTTGAACCCTGGAGGCAGAGGTTGTA
GTGAGTCGTGATCACACAACTGCACTCCAGCCTGGGCAACAGAACAATACTCCATTCCCTCCCCTCTACC
CCACCAAAAAAAAAAAAAAATCCTGCCCTTAGATGAGCTCTAGGGCTGCTGAGTACAGTTGTCCCAGTTG
CACAGTGCCCAAGGGTTTGGCATTGCTAAGAAGGCCACGTGCAAATCCTAGATATTGAGTGTTGTATGTT
TGTGACGTTGGTTTCCCGACATGTGAATGGCCCAAGTGTCTGGAAGAAGTGGCGCCACTTTCTAATTTGC
TTGGAGATGTTGCATGTCCCTTAAATTCAGACAGGTGCAGGTAACTGGAGGTTCTGAACCAAAGGTTAAA
ATGCAAATTCTCATACAGGGTTGGGAAGTTGTAGCCAGGGATAAGCTTATGTGACTGTTATATGGACTGA
GGAGCAGATGTGAATTTCGAACCATGACATGGCTGAGGGTAGGGGTCGGGTGGATGGATGATTCAGGGTT
GTAACCCATAGAGCCCAAAGGGGAAGTGATCTGTGACCTGGGGTGAGGGTGATCTGGAAGATTTTTGGAT
GGCTGGAAAGAAATGGGGAAGTCGAGCTGCCTGAGAGAGCCAAGTTATTTCCCAAAAGATTCCTTAGGAG
TCTTTCTGTTCAAGACCTCCGTGTGTGTGTGTGTGTGTTTAGGGTTCCCCAGCAATGGCCCAGGCATGTG
AAGGAAACAAGCTTCTTCAGGGAATATTTGTTGAATGAGTTTTCCTGACTCCCAGGCTAGAACTGTTTTT
GCAATTTCCACCCTCTTTTCTTTCCCCCAGAGAACTCCTATTCGTCCTTCAAAACCCATCACGGAAACCC
CTCTTGGAGAAAACCCTCCTTCCTTCCCCTCAGGACTTTCCCAGCCACCGTCTCTCCTCCAGTCCAGCCT
GATGCCATGGGACTGGGGGTTTCTCTGTCCAGCTCTGTTTCTCCCAGACTGGGGTCTGAGGACTCTCAGG
ACCCCCAACTTTACCTAGCACAGGCTGGGCACAAGTGGGTGACAGGGAGTCTACGCCTAGTGGAATTATG
TATTGGGGCAGGGTCAGTGTGAGAATACACATCCGCATGCATGTCTGTCCATGTCTGTCCGTACCAACCT
TCCCCTTCCACACGGACCTGGGCACATAGGAGGTGTCTGAGCCTGACACATGGGACAGAGAGTGGACATG
GCTGAGACACGGACAGAGAAAAGACAAGGAGTCCAGGGGGCTGAAAGCCTTTTGAAATCAGGAAGTTCCT
GTATTGGCAGAACAAAGCCCAGAGAGGAGCAGGGCTTTCCTCAACGCCACCCAGCAAGTGGACACAGAGC
CCGGCCTTGGATGACACCTCCAGGGTTCTGAACCCTGGACCTCGCTTTATGCAAGGAGCTGGCCCCACAT
TTCCATGAATCGGGGAAACAGCACAAGAAGGTTGGCCTGTGGCAGGGCAAGGGTTAAAGGGGTGACATTG
AGGGATGCCTCAGAGTCAAAGTCCCCTGACCAAGAGGAATAGAGTAGAAAACACAGAGACAGAGGGTGAG
ATCACGCCCCGATGAGGACGGAGAGAGACAGAGATGGAGAGAGACATAGAGGTGGAAATATACAGAGAAA
GATAAATGCAGAGACCAAGGCAGGGAGTGTCGGGGGAAGTAAAGAGGGTGTCCTGAAGAAAGAAGGATCT
GTTCACTCTTACCAGTCTGTCCTCGAATGATTTGCATAAAATGAGGAGGTGCCTGTCCACACCCCCAATT
CCTCTCTCAGGCCCCAGAGCCTGAGACCTCACCATGCCCCCATCAGAGATGCAAAAAACTAAACACCCAA
CTAGAAATCCTTGGGACCTCTCTCGGCTGGGATCTCAGAGCCTTTCTGTCCCCTACCCCTACCCCATGTG
CTGTCGATTTTGCAGATGGGGACAACCTGGGGCCTCCCGGAACTCTGCCACCCTGGGGAAGTTGGGGGAG
GGCCTTAGTCCCGGATCACAACCCCGTCTGCTCCCCAGAATCCTTTCCTAAGAATCGTTGAGGACCAAAG
TTGTCTTTGCTGACACGTGTTGCTTTTCTCTTTGCCTTTTATTGTTTCAGAGAAAAATCAAGTTGACTGT
GTCAAGTAACACCCCACCCCTTACCCCCGTCCAGCCATAGTGGCTCTCTGGAGACACAGGTCACAGGCGG
AGGGTCCCCTGATCATCCCCAACCACACAGCCAGGGGGACTTGACCCCTGTCCACCCCTGTCTCGTGCTC
CCTCAGACCCCCACAAACCGGCCAAGCAGTCCGGGGAGGCTTCCCCTCCACACAACTCTTAGCATGTGAT
TGCAGATGTGAAATCAAAACGTTGTTTGTTTTTTGTTTTGTTTTGATTCTACCCCGTCGGTCCAGTGTCT
GCACAGACGCCTTCATTTCTCTGTAAATATGTGACTTGGAACAAATGTTTAACACAAACGAGAAGTGGTC
ATGAATGCATGGTGTTGAGATGTTTTGCACTATTCTGACTTTTTGGTCTCTGTAAAAATATTTTATTAAC
AGCAGACATTAAAAAAAGAAAAACCACACACAGCCTTGGA
(SEQ ID NO: 5062 (SOURCE (NCBI Reference Sequence XM_017026502.1)).

[0205] In various embodiments, an UNC13A mRNA transcript comprises the sequence provided as SEQ ID NO: 5063.

CTGAACCAAGATGGCCGGTGGCGGCCGGGCCCCGGCGTGAGCCAAGCGCGGGCTGCAGCCGGGAGATGCC
CCAGCCCAGCGGCCGCTGAGCCCGACCCGACAGAGCCGGCCCGGCCGCCTCCGGCCCACCTGCGAGCTCG
GAGACATGTCTCTGCTTTGCGTTGGAGTCAAAAAAGCCAAGTTTGATGGTGCCCAAGAGAAATTCAACAC
GTACGTGACCCTGAAAGTGCAGAATGTCAAGAGCACGACCATCGCGGTGCGGGGCAGCCAGCCCAGCTGG
GAGCAGGATTTCATGTTCGAGATTAACCGTCTGGATTTGGGACTGACGGTGGAGGTGTGGAATAAGGGTC
TCATCTGGGACACAATGGTGGGCACTGTGTGGATCCCACTGAGGACCATCCGCCAGTCCAATGAGGAGGG
CCCTGGAGAGTGGCTGACGCTGGACTCCCAGGTCATCATGGCAGACAGTGAGATCTGTGGCACCAAGGAC
CCCACCTTCCACCGCATCCTCCTGGACACGCGCTTTGAGCTACCCTTAGACATTCCTGAAGAGGAGGCTC
GCTACTGGGCCAAGAAGCTGGAGCAGCTCAATGCTATGCGGGACCAGGATGAATATTCGTTCCAAGATGA
GCAAGACAAGCCTCTGCCTGTCCCCAGCAACCAGTGCTGCAACTGGAATTATTTTGGCTGGGGTGAGCAG
CACAACGATGACCCCGACAGTGCAGTGGATGATCGTGACAGTGACTACCGCAGTGAAACGAGCAACAGCA
TCCCGCCGCCCTATTATACTACGTCACAACCCAACGCCTCAGTCCACCAATATTCTGTTCGCCCACCACC
CCTGGGCTCCCGGGAGTCCTACAGTGACTCCATGCACAGTTACGAGGAGTTCTCTGAGCCACAAGCCCTC
AGCCCCACGGGTAGCAGCCGCTATGCCTCTTCCGGGGAGCTGAGCCAGGGAAGCTCTCAGCTGAGCGAGG
ACTTCGACCCTGACGAGCACAGCCTGCAGGGCTCCGACATGGAGGATGAGCGGGACCGGGACTCCTACCA
CTCCTGCCACAGCTCGGTCAGCTACCACAAAGACTCGCCTCGCTGGGACCAGGATGAGGAAGAGCTGGAG
GAGGACCTGGAGGACTTCCTGGAGGAGGAGGAGCTGCCTGAAGATGAGGAGGAGCTGGAGGAGGAGGAGG
AGGAGGTGCCTGACGATTTGGGCAGCTATGCCCAGCGTGAAGACGTAGCTGTGGCTGAGCCCAAAGACTT
CAAACGCATCAGCCTCCCGCCAGCTGCCCCAGGGAAGGAGGACAAGGCCCCAGTGGCACCCACCGAGGCC
CCCGACATGGCCAAGGTGGCCCCCAAGCCAGCCACGCCCGACAAGGTGCCTGCAGCTGAGCAGATCCCTG
AGGCTGAGCCACCCAAGGACGAGGAGAGTTTCAGGCCGAGAGAGGATGAGGAAGGCCAGGAGGGGCAGGA
CTCCATGTCCAGGGCCAAGGCCAACTGGCTGCGTGCCTTCAACAAGGTGCGGATGCAGCTGCAGGAGGCC
CGGGGAGAAGGAGAGATGTCTAAATCCCTATGGTTCAAAGGCGGCCCAGGGGGCGGTCTCATCATCATCG
ACAGCATGCCAGACATCCGCAAGAGGAAACCTATCCCACTCGTGAGCGACTTGGCCATGTCCCTGGTCCA
GTCCAGGAAAGCGGGCATCACCTCGGCCTTGGCCTCCAGCACGTTGAACAACGAGGAGCTGAAAAACCAC
GTTTACAAGAAGACCCTGCAAGCCTTAATCTACCCCATCTCGTGCACGACGCCACACAACTTCGAAGTGT
GGACGGCCACCACGCCCACCTACTGCTACGAGTGCGAGGGGCTGCTGTGGGGCATCGCGAGGCAGGGCAT
GCGCTGCACCGAGTGCGGTGTCAAGTGCCACGAGAAGTGCCAGGACCTGCTCAACGCCGACTGCCTGCAG
CGGGCTGCGGAGAAGAGCTCCAAGCACGGGGCGGAGGACCGGACACAGAACATCATCATGGTGCTCAAGG
ACCGCATGAAGATCCGGGAGCGCAACAAGCCCGAGATCTTCGAGCTCATCCAGGAGATCTTCGCGGTGAC
CAAGACGGCGCACACGCAGCAGATGAAGGCGGTCAAGCAGAGCGTGCTGGACGGCACGTCCAAGTGGTCC
GCCAAGATCAGCATCACCGTGGTCTGCGCCCAGGGCTTGCAGGCAAAGGACAAGACAGGATCCAGTGACC
CCTATGTCACCGTCCAGGTCGGGAAGACCAAGAAACGGACAAAAACCATCTATGGGAACCTCAACCCGGT
GTGGGAGGAGAATTTCCACTTTGAATGTCACAATTCCTCCGACCGCATCAAGGTGCGCGTCTGGGACGAG
GATGACGACATCAAATCCCGCGTGAAACAGAGGTTCAAGAGGGAATCTGACGATTTCCTGGGGCAGACGA
TCATTGAGGTGCGGACGCTCAGCGGCGAGATGGACGTGTGGTACAACCTGGACAAGCGAACTGACAAATC
TGCCGTGTCGGGTGCCATCCGGCTCCACATCAGTGTGGAGATCAAAGGCGAGGAGAAGGTGGCCCCGTAC
CATGTCCAGTACACCTGTCTGCATGAGAACCTGTTCCACTTCGTGACCGACGTGCAGAACAATGGGGTCG
TGAAGATCCCAGATGCCAAGGGTGACGATGCCTGGAAGGTTTACTACGATGAGACAGCCCAGGAGATTGT
GGACGAGTTTGCCATGCGCTACGGCGTCGAGTCCATCTACCAAGCCATGACCCACTTTGCCTGCCTCTCC
TCCAAGTATATGTGCCCAGGGGTGCCTGCCGTCATGAGCACCCTGCTCGCCAACATCAATGCCTACTACG
CACACACCACCGCCTCCACCAACGTGTCTGCCTCCGACCGCTTCGCCGCCTCCAACTTTGGGAAAGAGCG
CTTCGTGAAACTCCTGGACCAGCTGCATAACTCCCTGCGGATTGACCTCTCCATGTACCGGAATAACTTC
CCAGCCAGCAGCCCGGAGAGACTCCAGGACCTCAAATCCACTGTGGACCTTCTCACCAGCATCACCTTCT
TTCGGATGAAGGTACAAGAACTCCAGAGCCCGCCCCGAGCCAGCCAGGTGGTAAAGGACTGTGTGAAAGC
CTGCCTTAATTCTACCTACGAGTACATCTTCAATAACTGCCATGAACTGTACAGCCGGGAGTACCAGACA
GACCCGGCCAAGAAGGGGGAAGTTCTCCCAGAGGAACAGGGGCCCAGCATCAAGAACCTCGACTTCTGGT
CCAAGCTGATTACCCTCATAGTGTCCATCATTGAGGAAGACAAGAATTCCTACACTCCCTGCCTCAACCA
GTTTCCCCAGGAGCTGAATGTGGGTAAAATCAGCGCTGAAGTGATGTGGAATCTGTTTGCCCAAGACATG
AAGTACGCCATGGAGGAGCACGACAAGCATCGTCTATGCAAGAGTGCCGACTACATGAACCTCCACTTCA
AGGTGAAATGGCTCTACAATGAGTATGTGACGGAACTTCCCGCCTTCAAGGACCGCGTGCCTGAGTACCC
TGCATGGTTTGAACCCTTCGTCATCCAGTGGCTGGATGAGAATGAGGAGGTGTCCCGGGATTTCCTGCAC
GGTGCCCTGGAGCGAGACAAGAAGGATGGGTTCCAGCAGACCTCAGAGCATGCCCTATTCTCCTGCTCCG
TGGTGGATGTTTTCTCCCAACTCAACCAGAGCTTTGAAATCATCAAGAAACTCGAGTGTCCCGACCCTCA
GATCGTGGGGCACTACATGAGGCGCTTTGCCAAGACCATCAGTAATGTGCTCCTCCAGTATGCAGACATC
ATCTCCAAGGACTTTGCCTCCTACTGCTCCAAGGAGAAGGAGAAAGTGCCCTGCATTCTCATGAATAACA
CTCAACAGCTACGAGTTCAGCTGGAGAAGATGTTCGAAGCCATGGGAGGAAAGGAGCTGGATGCTGAAGC
CAGTGACATCCTGAAGGAGCTTCAGGTGAAACTCAATAACGTCTTGGATGAGCTCAGCCGGGTGTTTGCT
ACCAGCTTCCAGCCGCACATTGAAGAGTGTGTCAAACAGATGGGTGACATCCTTAGCCAGGTTAAGGGCA
CAGGCAATGTGCCAGCCAGTGCCTGCAGCAGCGTGGCCCAGGACGCGGACAATGTGTTGCAGCCCATCAT
GGACCTGCTGGACAGCAACCTGACCCTCTTTGCCAAAATCTGTGAGAAGACTGTGCTGAAGCGAGTGCTG
AAGGAGCTGTGGAAGCTGGTTATGAACACCATGGAGAAAACCATCGTCCTGCCGCCCCTCACTGACCAGA
CGATGATCGGAACCCAGATGATCTTCAATGCAGCCAAGGAGCTGGGTCAGCTGTCCAAACTCAAGGATCA
CATGGTACGAGAAGAAGCCAAGAGCTTGACCCCAAAGCAGTGCGCGGTTGTTGAGTTGGCCCTGGACACC
ATCAAGCAATATTTCCACGCGGGTGGCGTGGGCCTCAAGAAGACCTTCCTGGAGAAGAGCCCGGACCTGC
AATCCTTGCGCTATGCCCTGTCGCTCTACACGCAGGCCACCGACCTGCTAATCAAGACCTTTGTACAGAC
GCAATCGGCCCAGGGCTTGGGTGTAGAAGACCCTGTGGGTGAAGTCTCTGTCCATGTTGAGCTGTTCACT
CATCCAGGAACTGGGGAACACAAGGTCACAGTGAAAGTGGTGGCTGCCAATGACCTCAAGTGGCAGACTT
CTGGCATCTTCCGGCCGTTCATCGAGGTCAACATCATTGGGCCCCAGCTCAGCGACAAGAAACGCAAGTT
TGCGACCAAATCCAAGAACAATAGCTGGGCTCCCAAGTACAATGAGAGCTTCCAGTTCACGCTGAGCGCC
GACGCGGGTCCCGAGTGCTATGAGCTGCAGGTGTGCGTCAAGGACTACTGCTTCGCGCGCGAGGACCGCA
CGGTGGGGCTGGCCGTGCTGCAGCTGCGTGAGCTGGCCCAGCGCGGGAGCGCCGCCTGCTGGCTGCCGCT
CGGCCGCCGCATCCACATGGACGACACGGGCCTCACGGTGCTGCGAATCCTCTCGCAGCGCAGCAACGAC
GAGGTGGCCAAGGAGTTCGTGAAGCTCAAGTCGGACACGCGCTCCGCCGAGGAGGGCGGTGCCGCGCCTG
CGCCTTAGCGCGGGCGGTCGGCCGAGCGGCACTGCGCCTGCGCGGAGGGCGCTGGGCGGGGAGGGACGGG
GCTTGCGCCTTGGTGGGACCTCCCCAGGGGCGGGGCTCGGGGGGCTCCACGCCAAGGGTGGGCTGCGCCT
ACGCCCTTGACTCAGCTTTCCCTTTTGGGGAATTAGGAATGGAGGATGCCCCGCCCTCTCGGGAGGCCAC
GCCCAAGGGCGCGACGAAGGAAGGAGCCACATCCCCAACTTGAGGCCACGCCCCCAGCACCTAGGGGGCA
TTTTGAGCTGGGATGGGGGAAACCTCGTCCCTATGGAGGAGGCCACATCCCGGGGCTCTGGTACCGGGAG
GCACCACCTCATGTCCCCTGGAAAAGCCATAAGATGGGACCCAGACCCCTGGGACCCCAGACCAATTGCC
AAGTATGGAAATCTCAGCTCCCTCGAGGGGGGGCCCTGGGCAAGGGGTAGGGCTCTCTGGAGCGCCCCTC
TAGGTGGCCTGGGGACTGGAGGGACCAGGATGCTGGTTGGAGGGCCCCGGAATACCGGAGTCCCTTTAGA
TATTTGTGCAAAAAATAAATGGGGGGAGGGGGGAGGATGGGATTTCAAAAGCACATGCGCCCTTGGGCGC
CCAAACCCTGGGGGCCGAGGGGACGGCTCTGGTTCCCCACGCTGCCCCTACTTCCCTTTGGGAGTTTGCC
TCTCCCTCTCCCCCAACAAACCCAGTCCTCATATCATAGAGTTCAACACACCCATTTGACAGATGGCAAA
ACTGAGGCTTAAAGAGCTGCTTGAGACTTGGCCAAGGTTCCAGGTGCCATACCCTCTGTGCCCCTCCCTT
AGGCCTGTGTGCCCCATGGAAGGGTGGGCTGAGATCGGGATGACCTGACACAGCTCCCTATTGCTGCTAA
TTCCCCCTCGGCCTCCTCCAAGGGGTGGGAATTCCAGGCCAAGACCCCTACTTCGCCTTTCCTTCTCCGG
CTGCCAAGCAGGACCTTTGCCCTCAGCCCTTTCTCCTGGGATCTCCATGGGGGATGCCATGAGGGCCTCC
CACCACAAAAGAGAATTTGGGATCCCCTGGTCCCAGGTTTCTCCATCCCTTCTTCCTTTTCCAGAATTTT
CCAAATAGGAAAGAACAGAAGGAGACCAGAAACTCTAGGGGGGAGAAAGAGAATGAGAGAAAGAGAATGA
GAGAGAGAGAAACACAAACACAGTGACACAGTGAGAGCTTAGTCTCCAAGAGCCTATTCATTGATTCAAA
CACCCAAGCCACAGGATACCTCAGATGGCCCTCTTGCCAGCTGGAAGCTCTTTCTCCAATGAGCAAAGTT
ACAGTGACCTGGCTGGAGTTACCTGGTGCACATAGGACCTTAGGGGAAAGTTCAGCGTGGACTACACTTG
CTCTGGGATCTGCTTTTCCACATGTGTGTATGGCACGCCTTTTTCTGCTGGATTGGGAAGGACAAGATTT
TGCTGTGCTAGGGAGAAATGAAAACGGGGTGAGCTGAGTAGCTGGGTTTCTGGAGGATAGAACATCAGAT
GGGGAGGCTTTCCGAGGTGAAGAATGAGAGGGAACCACTTACTAGAGAGAAAAGAGCTCCAGGCCTGGGG
AACAGCACGTGCGAAGGCCAGGAGAGAAGAACTGTTGAAACAACGAGAAGGGTGGCACGGCTGGAGCTGA
GCCAGCAAGGGGGATCGTGAGGAGCCTTGGGGTTGGGGAGATCTGCAGAAGCATCAGACCAGGCAGGGCC
TCGTACGCAGTCCTGAGGAGTTTTACTTTTATTCTAAGACAGTTGGGGAGCTCCAGGAGCTGTTTTAAGT
TGGGGAGAGACTGGATTCCAGCCTGCAAAAGCTGTTTTGTGAAGACTAAAACCAGTGAGGAGAGGTGGAG
GTGCTTTGGGGACACTGAAATGGATTCTTGGAAAGATTCTGAAGGCTGTGTTGAAAAGACACCTATAGCT
GTGGGGACATGACTATAATCCCAGCATTTGGGGAGACCGAGGCTGGCAGATCACTTAAGGTCAGGAGTTT
GAGACCAGCCTGGCCAACATGGCGAAACCCCATCTCTGCTAAAAATACAAAAATTAGCTGGGTGCAGTGG
TGCATGCCTGTAGTCCCAGCTACTCAGGAGACTGAGGCGGGAGAATTGTTTGAACCCTGGAGGCAGAGGT
TGTAGTGAGTCGTGATCACACAACTGCACTCCAGCCTGGGCAACAGAACAATACTCCATTCCCTCCCCTC
TACCCCACCAAAAAAAAAAAAAAATCCTGCCCTTAGATGAGCTCTAGGGCTGCTGAGTACAGTTGTCCCA
GTTGCACAGTGCCCAAGGGTTTGGCATTGCTAAGAAGGCCACGTGCAAATCCTAGATATTGAGTGTTGTA
TGTTTGTGACGTTGGTTTCCCGACATGTGAATGGCCCAAGTGTCTGGAAGAAGTGGCGCCACTTTCTAAT
TTGCTTGGAGATGTTGCATGTCCCTTAAATTCAGACAGGTGCAGGTAACTGGAGGTTCTGAACCAAAGGT
TAAAATGCAAATTCTCATACAGGGTTGGGAAGTTGTAGCCAGGGATAAGCTTATGTGACTGTTATATGGA
CTGAGGAGCAGATGTGAATTTCGAACCATGACATGGCTGAGGGTAGGGGTCGGGTGGATGGATGATTCAG
GGTTGTAACCCATAGAGCCCAAAGGGGAAGTGATCTGTGACCTGGGGTGAGGGTGATCTGGAAGATTTTT
GGATGGCTGGAAAGAAATGGGGAAGTCGAGCTGCCTGAGAGAGCCAAGTTATTTCCCAAAAGATTCCTTA
GGAGTCTTTCTGTTCAAGACCTCCGTGTGTGTGTGTGTGTGTTTAGGGTTCCCCAGCAATGGCCCAGGCA
TGTGAAGGAAACAAGCTTCTTCAGGGAATATTTGTTGAATGAGTTTTCCTGACTCCCAGGCTAGAACTGT
TTTTGCAATTTCCACCCTCTTTTCTTTCCCCCAGAGAACTCCTATTCGTCCTTCAAAACCCATCACGGAA
ACCCCTCTTGGAGAAAACCCTCCTTCCTTCCCCTCAGGACTTTCCCAGCCACCGTCTCTCCTCCAGTCCA
GCCTGATGCCATGGGACTGGGGGTTTCTCTGTCCAGCTCTGTTTCTCCCAGACTGGGGTCTGAGGACTCT
CAGGACCCCCAACTTTACCTAGCACAGGCTGGGCACAAGTGGGTGACAGGGAGTCTACGCCTAGTGGAAT
TATGTATTGGGGCAGGGTCAGTGTGAGAATACACATCCGCATGCATGTCTGTCCATGTCTGTCCGTACCA
ACCTTCCCCTTCCACACGGACCTGGGCACATAGGAGGTGTCTGAGCCTGACACATGGGACAGAGAGTGGA
CATGGCTGAGACACGGACAGAGAAAAGACAAGGAGTCCAGGGGGCTGAAAGCCTTTTGAAATCAGGAAGT
TCCTGTATTGGCAGAACAAAGCCCAGAGAGGAGCAGGGCTTTCCTCAACGCCACCCAGCAAGTGGACACA
GAGCCCGGCCTTGGATGACACCTCCAGGGTTCTGAACCCTGGACCTCGCTTTATGCAAGGAGCTGGCCCC
ACATTTCCATGAATCGGGGAAACAGCACAAGAAGGTTGGCCTGTGGCAGGGCAAGGGTTAAAGGGGTGAC
ATTGAGGGATGCCTCAGAGTCAAAGTCCCCTGACCAAGAGGAATAGAGTAGAAAACACAGAGACAGAGGG
TGAGATCACGCCCCGATGAGGACGGAGAGAGACAGAGATGGAGAGAGACATAGAGGTGGAAATATACAGA
GAAAGATAAATGCAGAGACCAAGGCAGGGAGTGTCGGGGGAAGTAAAGAGGGTGTCCTGAAGAAAGAAGG
ATCTGTTCACTCTTACCAGTCTGTCCTCGAATGATTTGCATAAAATGAGGAGGTGCCTGTCCACACCCCC
AATTCCTCTCTCAGGCCCCAGAGCCTGAGACCTCACCATGCCCCCATCAGAGATGCAAAAAACTAAACAC
CCAACTAGAAATCCTTGGGACCTCTCTCGGCTGGGATCTCAGAGCCTTTCTGTCCCCTACCCCTACCCCA
TGTGCTGTCGATTTTGCAGATGGGGACAACCTGGGGCCTCCCGGAACTCTGCCACCCTGGGGAAGTTGGG
GGAGGGCCTTAGTCCCGGATCACAACCCCGTCTGCTCCCCAGAATCCTTTCCTAAGAATCGTTGAGGACC
AAAGTTGTCTTTGCTGACACGTGTTGCTTTTCTCTTTGCCTTTTATTGTTTCAGAGAAAAATCAAGTTGA
CTGTGTCAAGTAACACCCCACCCCTTACCCCCGTCCAGCCATAGTGGCTCTCTGGAGACACAGGTCACAG
GCGGAGGGTCCCCTGATCATCCCCAACCACACAGCCAGGGGGACTTGACCCCTGTCCACCCCTGTCTCGT
GCTCCCTCAGACCCCCACAAACCGGCCAAGCAGTCCGGGGAGGCTTCCCCTCCACACAACTCTTAGCATG
TGATTGCAGATGTGAAATCAAAACGTTGTTTGTTTTTTGTTTTGTTTTGATTCTACCCCGTCGGTCCAGT
GTCTGCACAGACGCCTTCATTTCTCTGTAAATATGTGACTTGGAACAAATGTTTAACACAAACGAGAAGT
GGTCATGAATGCATGGTGTTGAGATGTTTTGCACTATTCTGACTTTTTGGTCTCTGTAAAAATATTTTAT
TAACAGCAGACATTAAAAAAAGAAAAACCACACACAGCCTTGGA
(SEQ ID NO: 5063 (SOURCE NCBI Reference Sequence XM_011527811.2)).

[0206] In various embodiments, a UNC13A transcript is a pre-mRNA UNC13A transcript. In various embodiments, a UNC13A pre-mRNA transcript comprises a sequence provided as SEQ ID NO: 5064.

CAGTGGCTCACACCTGTAATCCCAGCACTTTGGGAGGCCGAGGTGGGTGGATCACTTGAGGTCAGGAGTT
GGAGACCAGCTTGGCCAACATGGTGAAACCCTGTCTCTACAAAAAATACAAAAATTAGCCGGGCATGATA
GAGAGTGTACCTGTAATCCCAGCTACTCGGGAGGCTGAGGCAGGACAATCCCTTGAATCTGCGAGACAGG
TTACAGTGAGCTGAGATCTCAACACTGCACTCCAGCCTGGGCGACAGAGCAAGACTCCATCTCAAAATGT
ACCCTGTAACAATATATAAGATGTCAACATTAGTAGAAGCACTCAAGCCTAGATGATAGAGAGAGATTCA
GTCTCAAAAAAAAAAAAAAAAAAAAAAAGAGAAAGAAATGGATAAAAGACTTGAACAGGCATTTCACCAT
AAAAAGAAACCAGTAATCACATAAAAAGTTCAACGTCAAGAGCAATCAGAAAGCAAACCAAAACCCAAAT
GAGGCACTCCTTCCCTCCCTCCACATAGGCCCAGTGAAAAAACTTGGACAATTCAAAGTGTTGGCAAGAA
CTTAGAGCCAGGCACGGTACCTCATGCCTGGAATTCCAGCACTTTGGCAGGCCGAGGCAGGAGGATCACT
GGAGCTCAGGAGTTTGAGAACAGCTTGGGCAACATAGGGAGACCCCATCTAAAAAAAATAAAATGAGCCA
GGCATGGTAGCACAGGCTTGTAGTCCCAGCTCCTTGGGAAGCTGAGACAGGAGGATCGCTTGAGCCCAGG
AGGTGGAGACTGCAGTGAGCTGTGATTGCACCATTGCACTCCAGCCTGGGCCTCAGAGTGAGACTATCTC
AAGAAAAAACAAAAACCAATAACAAAACAAAAACAAAACATAGAGGAACCGATGATTATACTGTGTTGGT
ATGATGAAAATCGCCAGACTCCCAATAAAAAACATGACATTATCAGGTGAAGCTGAGCATATATGTATTT
TCTTTTCTTTCTTTCCCTCCTTTTTTTTTTTTTTTTTTGAGACAGAGTCTTGCTCTGTTTCCAGGCTAGA
GTGCAGTGGCGTGATATCGGCTCACTGCAACTTCCGCCTCCTGGATTCAAGCAATTCTCCTGCCTCAGCC
TCCTGAGTAGCTGGGACTACAGGGGTGTGCCATAATGCCTGGCTATTTTTGTGTGTGTTTTTAGTAGAGA
CAGGGTTTCACCATGTTGGCCAGGATGGTCTCGATCTCTTGACCTCATGATCTGCCCATCTCAGCCTCCC
AAAATGCTGGGATTACAGGCATGAACCACCATGTCTGGCCACATATATGTATTTTCTGACCCAGCCATCC
TTACTCATGTGTGCCAGCACACAAGTCTGAAGTCTGAGGATGGTCATAAAAACTTTTTTTTGTAATAAAC
CTGAGCTTGAAACAACCCAAAAGTCCATGACCTGGAGAACAGATGAATAGCCAATAGAAGATTCATACAA
AGGAATACTATGCAGCAGTAAAAAATGCAAGCCTTACAGCCACATGCAGCGATATGGATGAATATCAGCA
GAATCACATTGAGCAAACAAAACAGATTAGCAGTCCAGGTGCTGTGGCTCACACCTGTAATCCCAGCACT
TTGGGAGGCTGAGGTGGGTGGATCACCTGAGGTCAGGAGTTTGAGACCAGCCTGGCCAACATGGTGAAAC
CCTGTCTCTACTAAAAATACAAAAATTATCACTGCAACCTCCATGGCCAGGCATAGTGGCTCATGCCTGT
AATCCCAGCATTTTGGGAGGCCGAGATGGGCAGATCACCTGAGGTCAGGAGTTCGAGACCAGCCTGACCA
ACATGGAGAAACCCCGTCTCTACTAAAAATTACAAAAAAATTAGCTGGGCATGGTGGCACATGCCTGTAA
TCCCAGCTACTCAGGAGGCTGAGGCAGGAGAATTGCTTGAACCTGGGAGGCGGAGGTTGCGGTGAGCTGA
GATCGTGCCATTGCACTCCAGCTTGGGCAACAAGAGCAAAACTCTGTCTCAAAAAAAAAAAAAAAAAAAA
AAAAAAAAAAAAAGCCAGGCAAGGTGATGGGCGCCTGTAATCCCAGCTACTCGGGAGGCTGAGGTAGGAG
AATCGCTTGAACCTGGGAGGCAGAGATTGCAGTGAGCGGAGATTGTGCCACTGCACTCCAGCCTGGGTGA
CAGAGTGCAGCTCTGTTTCAAAAAACAAACAAACAAACAGATTAGTAAAGAATGTGAACAAAGTCAAATG
AGGTGGCTCATGCCTGTAATTTCAGCACTTTGGGAGTCCAAGGCAGGCAGATTGTTTGAACCCCAGAGTT
CAAGACAAGCCTGGGCAACATAGTGAGACCCTCATCTCTAATTAGCCAGGCATGGAGGTGCATGCCTGTT
GTTCCAGGTACTTGGGAGGCTGAGACAGGAGGATTGTCTGAGCTCAGGAGCTCACACCACTGTACTACAG
CCTGGGTGACACAATGAGACCTTGTCTCAAAAAAATAGAAACATGCAAGAGGTAACCATGTATTGTTTGC
TAAGGAGCATGTGGTAAACTATAAGGAAAAGGAAGAAAATGAAAAACAAAATTTGTGATAGTTCTTCCAT
CTGCAGGGAAGGATTATGAGATTGGGGAGAGGCACATGGGGGTCTTTTATTGTGATGGTATTTTTTTTTT
TTTTTGAGACGGAGTCTCTCTCTGTCACCCAGGCTGGAGTACAGTGGCCCGATCTCGGCTCACTGCAAGC
TCCGCCTCCCGGATTCACGCCTTTCTCCTGCCTCAGCCTCCTGAGTAGCTGGGAATACAGGCGCCCGCCA
CCACGCCCGGCTAATTTTTTGTATTTTTAGTAGAGACGGGTTTTACCGTGTTAGCCAGGATGGTCTCGAT
CTCCTGACCTTGTGATCACCCCGCCTCAGCCTCCCAAAGTGCTGGTATTATAGGCGTGAGCCACCGAGCC
CGGTCGATGGTAATTTTTTTTATCCAAGCCTGCTCCTCATAGTTTATCTACTCATTGATGTTTAATAAAA
CATCAATGTTTTATTGATTATCAATGTTTAATAAAACATCTACTCATTGATGTTTAATAAAAATTTAAGA
CCAGGCATGGTGGCTCATGAGCCTGTAATCCCAACATTTTGGGAGGCTGAGACGGGAGGATCACTTGAGC
CCAGGAGTTTGAGACAGCCTGTGCGACATGGTGAAACTCTGTCTCTACAAAAAATACAAAAATTAGCTGT
GCTGATTTTTTTAAAAATTTAAAGCAGTGACAGATACAAACATGGTTACTATTAGGCATTAAGATTACAA
CTGGGGCCAGGCGCGGTGGCTCATTCGTGTAATCCCAGCATTTTGGGAGGCCACGGTGGGTGGATCACTT
GAGGTCAGGAGTTTGAGACCAGCCTGGCCAACATGGTGAAACCCCATCTCTACAAAAAATACAAAAAAAT
TAGCTGGATGTGGTGGCGAGCGCCTGTAATCCCAGCTACTCAGGAGGCTGAGGCAGGAAGATCACTTGGA
GGTTGAGGTTGCAGTGAACTGAGATGGTGCCACTGCACTCCAGCCTGGGCCACAGATTGAGACTACACCT
CCAAAAAAAAAAAAATTACAACTGGTTTCACATGTTAACTCATGTAATACCTCCAGCAACCTTGTGAGGC
AGGACTTGTTATCATATTCATTCTACAGGTGCGGAAACTGAGGCACGAGGAGGTCACAAGACCTGCCCAA
GGCCATGCTTGTGATGAGAGACAGAGTTTGGTTTTGAACAATGGCCTCACTCAACTCCATGCACATTCTG
CATTTATGAAGCTCTTTCATGTGGGCTGGGGGCAGGAGACCCTGTGGGGCTCAGCCTTTCATGCTAGTTT
AGGTGCCAGTGATACAGCGAGCAGGTTGCAGGGCAAGGGGCCCACATGGAGCTGCCCAGTTTGATATGTG
GGGAGGGGGCCAGGCGCAGTGGCTCAGGTCTGAATCCCAGCACTTTGGGAGGCCGAGATGGGCGGATCCC
CTGAGGTCAAGTGTTCAAGACCAGGCTGGCCAACATGGTGAAACCTCGTCTCTACTAAAAATAAAAAAAA
TAAAATAAAAAAAAAAAGCTGGGCATGGTGGCATGCGCCTGTAGTCCCAGCTACTCGGGGAGGCTGAGGC
AGGAGAATCTCTTGATCCCAGGAGGCAGAGGTTGCAGTGAGCCAAGATTGCGTCACTGCATTCCAGCCTG
GGCTGCAGAGGGAGACTCCATCTAAAAAAAAGAAAAGTGGGGAGGAGTGGCAGAGTTTCGTTCGGGTCAG
GGCCCAATCAGAGGAAGGGATAGGGGCTGGGGGAGTCCAGAGAGGAGAAACAAAGGCTCAGCTTGGGGCA
GTCAGGGAAGCCTTCCTGGAGGAGAGGATATTCAGACAAGACATTGATGGATGAAAAGGAGTTCAGAGTG
TGGGCAAGGACCCATGGGCTGGATGGCTTAGAGACATAGAGAGAGACCTAGACAGGATGCAGTAGAGCTG
CAAAAAGACTTTACAGAGAGAGGCTAAGAGACACATGACTGAGAGAGCAGTGGACAGAGTCAGAGGAACA
GAGACCCAGGGAGAGAAAGAGACCAGGCAGTAGAGTTAGAGAGACAGAGACGTAGAGACAGAGGAAGAGA
GATACTCAGAGAACAGGACCATCTGCCCGGTGCTGGTGCCGGGCGTACACACAAGAGCTTGCATTTGCCT
GTACTTGCTTGAGTATTGCAGGGAGGCGTTTGCCCAGGTTACCAGGGCAGGAATGTCCATGCATGGGTGG
CGGGGGCACGTGCACCATTTCAGTGCAGGTGAGGGTCTGCACAGGAGGAAACCTGCTTGGGGGCCGCCGT
CGCCCCTTGTCCCCCTGCAACGAGGAGGTGTGGGGCGAGGCGCCCCTTCCCGGAGCCAGGCCCTTTAACG
CCCCCCCAGCCCGCAGCGCCCCCGCCCCATCAGGCGTCCCTGGGCTCCGCCTGCCCGCCCCGCATCAGCG
CCACGTCAGGCGCTGTCCGCGCCCCCGGTGCTGAACCAAGATGGCCGGTGGCGGCCGGGCCCCGGCGTGA
GCCAAGCGCGGGCTGCAGCCGGGAGATGCCCCAGCCCAGCGGCCGCTGAGCCCGACCCGACAGAGCCGGC
CCGGCCGCCTCCGGCCCACCTGCGAGCTCGGAGACATGTCTCTGCTTTGCGTTGGAGGTAGGAGGCGAGG
CTGGGGGTCGGGGGACCCGTGTGGACGCGGGCTGGGGTCGGGGTCCGCGTGGATGCGGCTCCCAGGGGGT
TCCTGGGGGGTGACCCGAGTCCAGGTGGCTGGACTTTTGAGAGGGGTAGCCCTTGTCGACGCAGCTGGGC
CCCGGAGGGGGTGATCCGTGTAGACGCGGCAGGGCTCTCGGGGGTCCTGGTGGCCGCTGCTGGAGGGGTC
GTGTGGACGCGGCTGAACGCGGAGGCCCGTGTGGACGTGGACGGGTATCCGGGGTTCTACCCGGAAACGA
TCTAGACTGGGGCGTCTGTGTAGACCAGGTTTTTAGAGGGTCAGTGAGGAAGAGTCTGGGCTCGGTAGTT
TGATTGAAGCCTGCAGGGGTGCTTGGAAGGGGTCTGGTGTTGTGGGCTGGGTTACGGGTCCTCATGGACG
CGGACCCGGCTGGAAATTCGAAGGAGAGTGCGGTGGGAGGGTTCTCCAAGCCGTGGGGATGTAAGATATA
GGTAGAGGGGCTTGGCCATCAGGGCATCCACGAGTTCTAGGACTCTCCCAGCCCTAGGTGTAAAGAGGAC
TGGAGTGGGGGGAGTGTGGAGACAGGAGACCCCTCCCAGCGTCCAGAGAGGGCTGTGACTGGAGGTCTGG
GGGCGCTTTTCCAGTTAACTCTTTGGCCTCCCGAGTGAGGGGGTTGGAGGAATGTCCAGAAGGTCTTCCC
GCTCCCTGCCCCCTCCGGTTCTCCCAAACACGTTTCAGGGCCTTCTCGGCAGGGAGCCTACTTCTTGGAA
GAGCAATGTCTCCTGGTCCCCCTCCTGGCCCATCCTCACCTCACCCACTTTGCACTGGAGAGAGGGAGGG
AGGGAGACGTGAGGTGGGGGGGGAGCTATTTTGGGGCCAGAACGCCATCTGCACAGAGGCCCACGCCCAG
GCCCACGCTCTGCGTTGGGGTTGGAGGAGGGAGGGAGACGTGGGAGGGGCATGACCCCCCACCCCACACC
TTTATGGCTCTGGGGTCGTGGGGAAGCCAGCCCAACCGAACCCAGGCGTTCTGGGCACTCCCGTTTGAGA
AATCAAACTCTGGGAGACCTTGGGCGGCAGGGGTGGATGTGGACCGCCGTTCCACGCCTACAGAGCTCTG
AACCCCTGGTTCTTAAGGACTGGGGTCCCCCCGTCACTCCCACCCATTTCAAGAAGGCTGGGGTGGGGGA
AGGGGTGTGTCTGCCAAGCCTGAGACTGCAGGCTTCGGGAGACCTCGGGCGACAGGAAGCGTGCGTGTGC
TGAACTCCTGCTGCCTGGACACAGGGTGGGCAGGCCGGGGAGCCGGGAACCGCCCCCGCCGCCCCTCCTC
CTCCCTCCCCTCCCCCTCGGCCGATTCATTCACAAACCCTGCCCCGCCCGCCCGCTCCCCGCCGCGGCAG
CTTCCGAGTGCAAATCCGGCCGGGCTGGGCCGGCGTGGACGCGGGTGTTCTTAAAGGGACAGGGGCCTAC
TTTCTCTAAGCTCGTTTCTGCTGGACGGGGCTGGGGGTGGTGGAAGAAGGGTCCCTAGAGTCAAAGGTCA
ACTCCTCCATCCCCTAGCCTCCAGGCCTATGGAGTTAGGGGAGTAGGGAAGTGAAGGAGACCCCTAGGCG
ACCCCCACCGCCTAGGCCTGAGGACGGAATGGGAGGAGAACTTGAATGTCCAGACCCCCTACTGACCTCT
CCCCCTGCTCTAAGTAGCCGGGCTCTTAAAGGTGGCACTGGAGGAGGTTCCGACGTGGGTGTTCTTGGCT
GACTCCTCTATCCTCTCTCTTCTCCCCCCAGCATCCCGCCCCACCCCGCCTCACATCCTCCAAGTTGGGC
TTCTCTGGAAGGTTTGCCTAGTGGAGTGGGGGGGGGGGGGGGGGGGGGGGGATCTCACCCTTAACTCTGA
CGCAAACAGGAGGCTCGGCTGCGGGGGTGGCATTAAGGGGGGGCAGCAGGAGGCAAGAGGGATGAGGCTT
CCAGAAACAGAGACGTTGGGGGAGGACTGTGCTGGATTCTGTGGACTTTACAGGGAGGGGCCCGGCTGAG
TGGAGAGGAATCGCTGGGAGGGGCAAGGCTGGGGAAGAGGTTGACAGGGGTGGGAGGTAAGGCCCTCAGG
TGTAAAGGGAGGTGTGAGGTTGGAGTGAGGAGGAGTAGGAGGCAGGGAGGGGTGGGGAGAGGGAGAAGTG
CTGGGTGAGGCCAGTCTCCCAGGGAGAGGTGGGATGGTGCCCAGAGAGGGGAGGGGCTGGGATGGCTGAG
CACGAGAGATGTTGGGGTGGGCTTGGCAGGAGTGAAGCTAGGCTGAGATGGGTTGCCGTGTTGCCTGAGC
TCAGCTGAGGAAATACCTGTCCCCCCTCCCCTCCACCGGGGACCCACAGGCGTTTGCCAATCCCTACACA
CATTCATACCCAGACTTGTTCCTGTGTGGACACAAATGCTTAGGATGTATGAAGGCTCTACGCAGACCAT
GTGCCTGGGAAGGCACATTCCGTAGGCACACGTGTGTACTCAAATGCCTGTGTGAACACAAGCATACACG
TGTATATAGGACACAGTCTGCCGCTACAGATATAGTCCCAGCAACACACGTGTGAGTGTGTGTGTCTGCC
AGCACGCATATAGATGTATCCACGTGTCTGATGAATGCTCACAATATACATGTCACATAAAGATCCACCC
ATGTCCAGCCGAGCGCGGTGGCTCAGGCCTGTAATCTCATCACTTTGACTTTGGGAGGCCAAGGTGGGCA
GATCACTTGAGGTCAGGAGTTCAAGACCAGCCTGGCCAACATGGTGAAACTTTGTCACTGCTAAAAAATA
AAAAAAATTAGCCAGGTGTGGTGGCGCGCACCTGTAGTCTCAGCTACTCGGGAGGCTGAGGAAGGAGAAT
CACTTGAATAGGGGAGGTGGAGGTTGCAGTGAGCTGAGATCCTGCCACTGTACTCCAGCCTGGGCAACAC
AGTGAGACTCTGTCTCAAAAAAAAAGATTCACTCATGTCCTAACACTCAGACATGTACCCATACATATCT
GTTAAGGTCCCCAACCCCATGAAGCACATATATATTCATATAAGCACATGTCAAAGCCATGTGTGTATGC
ACATGACAACACTTGCCTGGACATTCAAAGCAGCCCCTTTCAACAAGTGGATGATGATGCATACAAGTAA
ATACACATTTGAGTATTTCATTGCACACAAGTGCATACATGTATGCAGATAAACAAATACAGCTGCCACA
GAACTGCATCCATGTACACATGCAAACATCAATATGTGTGTTTTCCACCTAACATATCACCCACAAGCTC
ACACACACCAGTGTGTCTCTGATGTAGTGACACCCCACTCCTAGACACACATGTGCAGACTCCCACCTGC
ACTTAAATGGTGCACATACTCTGCACACATGCACACTCATATCCATGTAGAGGCAGGCACCTGCCTGCCC
TGGTAAGATGAGCCAACTACTGCTGCAAATACCCAAGCAAGTACAGGCAAATGCAAGCTCTTGTGTATAC
ACCCAGCACCAACACATAGCAGACCACCCTGTATGGTGTATGGGCCTTATCTCTGCCCGCTTCATTTATT
TATTCATGTGGTGCCCCGCTGCTTCCCAACATCGTAATCCACTGACTAGGTCTTGGCAGGATCCTGAGGC
TGTGAATGGTAAATGCCACCTGGTTCCTTCATGAAGTCACTTATTTTATTTATGCAACAAGCATTAATTG
AGCACCTACTGTATACCAGGCACTGTTCCTGGCTCTGGGACCCAGCCCTATTCCTAGCCATCACTCCTGC
ACGTCCCATGGGGTTAGAATGAAAGAGATGAGGGAGGGCTAAGGGAGCTGAGGAGTGGGGTATCCAGGGC
TCTCTTCCTCTGGGAAGCCTACCCTGATTCCACCACCACCATTTACTTGAGTCTCAGAAGATGTGATGAG
GGGGAGATGAGCAGGAGGGAGATGGTGCTCTGGGTGGAGGGAACAGCATGAGCAAAAGCATGGTGGTGTG
AAGGGTTACTTCCAGATCTTCCTATGTGCCTCACAGCATTTTGCACAGGCCACTTGATGTTTTGTTTTGT
TTTGAGACAGAGTCTCACTCAAAGCCTGTTACTCAGGCTGCAGTGCAGTGGCATGATCTCAGCTTGCTGC
AGCCTTGACCTCCAGGGCTCAAGTGATCCTCCTGCCTCAGCCTCCCAAGTAGCTGGGAGTATAGGCATGC
ACCACCACACCCGGCTGACTTTTTTCTTTTTAATTTTTTGCAGAAGCAGGGTTTTGCCCTGCTGCCCAGG
CTGGTCTTGAACTCCTGGGCTCAAGTGATTCACCCTCCTCAGCCTCCCAAAGTGCTAGGATTACAGGTGT
GAGCCACCACGCCCAACTGATGTTTTAAAGGCTCTATAAACATGTTATGAATAAATGACATGAACAAATC
AGTGAATTTAGGTGAGGGTGGGTTTGCTTCACAACTTACAATAATATCAACAACAAACCCCATTTATCCA
GCTTTTTTGTTTGTTTGTTTGTTTTTTGAGACACGGTCTCACTCTGTCACCCGGACTGCAGTGTAGTGGT
GTGATCTCGGTTCACTGAAACCTCCACCTTCCAAGTTCAAGCGATTTTCCTGCCTCAGCCTCCCGAGTAG
CTGGGATTACAGGCACGTGCTACCACACCTAGCTAGTTTTTGTATTTTTAGTAGAGATGGGGTTTCTCAT
CTCTACTAAAAATACAAATACATCTCTAGTGGCCAGGCTGGTCTTGAACTCCTGACTTCAAGTGATCCTC
TTGCCTCGGCCTCCCAATGTACTGAGATTACAGGCTCGAGCCACCGTGCCCAGCCCAGCATTTCATAGGC
ATGATGTTAAGGATTTTTATGCCCATGCCCTCTTTAACTCTTACAGTAGCCCCATTGTACAGATGAGGAA
AACTGAGGCTCAGGGAGCTTTAACAACTTGCCTGGTGGAACAGAGCCAGAGGTGGAGCTGACTGACTCTA
GAGCCTACTGGGGTTGGCAGAAGTTTGAGCCTTCTCTCAGACCCCAGGACCTCGGAGACAGCCAAGTCCC
TTCTGTGGAGTGATGTTCTGCCCTGGGATTGCCTTCTTCTTTCTATTTATTTATTTATTGGAGACAGAGT
CTGGCTCTGTTGCCCAAGCTGGAGTGCAGTGGCACAATTTCAGTTCACTGTAACCTCCTCCTCCCGGGTT
CAAGCAATTCTCCTGCCTCAGCCTCCTGAGTAGCTGAGATTACAGATGCACACCATCATGCCCAGCTAAT
TTTTTGTATTTTTAGTGGAGATGGGGTTTCACCATGCTAGCCAGGCTGGCCTCGAACTCCTGACCACCAA
GTGATCTACCTGCTTTGGCCTCCCAAAGTGCTGGGATTACAGGCATGAGCCACTGTGCCCAGCCAGGATT
GCTTTCTTCTCTCATGCATCTAGTAAACAGACATGTCACAATCTCTCCATTCATCGGGGCTATTCCCCTG
CTCCTTGCCTAAGAAGCCTTCACACATCCCTCCGTTCCTGGCTACTCAGTCCCTGATACCCTCCAGCTAG
GAGGAGCTGCATCTAGGTCTTAGCTCCTACCGTTCTCATGGGATGCCCTCCAGAGTTGCATCTTCAGGGC
TGCAGCCTAACCCTTTCCCTAACCTGGCCTCACTTTTCTTCCACATACAATGGACCTCTTCTGCAAGGTG
CCAATAAGGGCATCCTGGGTCCAGCAGGCCTGAGTGTGAATTGCTAAGTCCACCACTTCCTGGCAAGTCT
CACATCCTCTGCATTCCTTGGTGTGCTCATCTGTGGAATGGGCACAGGAGTAGCATCCACCATCTACGTT
TGCCAGAACTCTCTAATGAGGCTTGCAGAGCCCCTGGCATGACTCCTGGCCTACGGGAAGGCCCAATAAT
CGTGAGCAAAAGACATGAAAAATCAATGATGGGCCGGCCCCGGTGGCTCACGCCTGTAATCCCAGCACTT
TGGGAGGCCTAGGCGGGCAGATCTCCTGAGCTCAGGAGTTCAAGACCACCCTGGGCAACATGGTGAAACC
CTGTCTTTACTAAAATACAAAAAAATTAGCTGGGTATGGTGGCGCGCGCCTGTAGTCCCAGCTACTCAGG
GGGCTGAGGCACGAGAATCGCTTAAGCCCCGAAGGCGGAGGTTGCAGTGAGCCGAGGTCGCGCCACTGCA
CTCCAGCTTGGGCTACAGAGTGAGACTCCGTCAAAAAAAAAAAAAAAAAAAAATCAATGATGATGTTTTT
ATTAATGGAGACTAAAAGCTTTCTGGAAGGCGGTTCTGAGTGCAGGACATTTCTGAGAGTCCACTGCATT
CTGGGGCCCGAGGAGCGCTCCAAGAGGGGTCCCCCAGGGCCACTCCAGGAGGGAGCCTAGTTCGTTGAGG
GTACACGGGTGGGACCGAGCATTCAGCACCGTGGACAGCGCCTGCCCGCGCCTCTGGGGGACAGCTCTTA
GCTCAGCCTCCCAGGATTAATGGAGGAGGTGACGTCATTCCTTCCGTGAATTACTATTTAATGAGCACCT
ACTATAGGCTAGGCCTACTTCTAAGTGGTTCATGGTAAACAACACACACACAAATCCCTTATTCCCGAAG
CTCTCTGGAACTCCAGGTTCTTGGTGTTTTTTACACTGAAGGCTCAGTCTGGCTCTGGTCTATTTGTGTC
AACGGAGGATAAGGGTCCTCATTTAGTGTCTCCCAGATGCGAAACCAGCACAGCTGAGGTCTTTTATCCT
AAAGCCCATCCATCTCCCGCTGAAATGCCCTCCACCAACATCACACACAAAACGATCAAATCTCCTATAA
TCTATTTCTGGATTCTCTATGCTTCCTCCCTTCCCCCAAGCTAATCCTGGGGGGGGTGGGCTTTCAGAAG
CCCTAGACGGCTGGATCTCCACCTCCTGTCTCCCCACCCCATCCCACGTGGCAGGTCAGGGAGCCAGTGC
CCCAAGACTGCAGTCCCCCCTAATTAGAATCCAGGGTCAGTCAGCCATGTGGTTCACGCCTGTAATTCCA
ACACTTTGGGAGGCCGAGGGGATGGCTTGAGCCTTGAAGCCAGCCATAGCAACATAGCAAGACCCCATCT
CTACAAAAAAAAAAAAAAAAAAAAAGGAATAGCCAAGCATGGTGATGCGCACCTGCAGTCTCAGCTACTC
GAGAGGCTGAGTGGGGAGGATCGCTTGAACCTGGGAGATCGAGGCTGCAGTGAGCCATGATCACACCACT
GCCCTCCAGCCTGGAGCCTGGGCAACAGAGAGAGACCCTGTCAAAAAAAAAAAAAAAAAAAAAAAGAAAA
GAAAAGAAAAAAAAAGAAGAAGAAGAAGAGAAAAGAAAGAAAAAGAAAAGAATCCAGGGTATTCAAATCC
TAGAATCCAGGCCAGGGACACCTTTAGAACACAACCAAATAATAAAAACAGTAAAGATATCAGTAATAAT
AATAATAGTATAAATGACACTATAATCATTCTGCAGAAGGGGTGAGGGAGGAAGAGGAGGGAAGAAGAGG
AGGAGAAAGGAGAGGGAAGGGAGATCAGCCACTCCGTCTCCCCATTTTCCAGATGCAGAAACGGAGGCGC
GAAGCCAGGCTGCAGGGGTGTCCCGCAGCCTGAACTCCTGCCTCAGCCTCCCCGGGTACGGCCACTACAT
TCATCAGTCAGCGCTTCTGGGGGCCCCAAAGACCTTTGAGGCCGCATGACGCGGTGTCTTCACCCGCTCG
TCGCTGGGGACAGCAGTGGGCACCCCCCTCATCCCCGCCCCCCTGTCCGCCGGCGCGCCTCCCACGCCCT
CCGCGCGCCCACGCTATAAATAGCCTCATGCGTGTGACCCGAAGCCCGCTGGGGAAGGGTGGCGCTTCCG
CCCCGCTGACCCTGATACAGCAACCCGGCGCAGGCGGGGAGGTGGCGGGATGTGACGACGAAGACGGTGA
CTCAGGGACCATTTACTGACCGGGGAAGACAGGGAGAGAGACTGGGTTCCTTCTCTGAGCCCCCTTCCTC
CTCCAAGCCTCTCCCCCGATACCACCCTCCCCTCTGCGCCCATCCCCCTTCCCGAATCCCCTCCCTCACC
GCGAACACCCTTCCCTCCTGAGAACCCCCTCGCCACTCTCGGCCCCCTTTCCTGTCCCCTTTTCCCTCTG
AGACCCCTCTCCCACTGGGAGCCCCAGTGATGAAAAATCATGGATGTCCTCAACCTGGACCTCGGCAGGG
AGCTAAGTGCAGGAGCCTGGCTTCAGCTATCAGAGGGTACAGCCCTCCAGCCGGTCCCCCACTGCCTGAG
GACCCCAACGGAGACCATTCCCCTCTAGCCAAGAGAGGCTGCAGGAAGGAGCTGAGGCTTAGGGAAGAGG
AGCCGGACTGACCAAGGGAGGGGCACAAGAAGGGCAGAGACAGTGAGAGAGAGAAGGAGAGAACAGAGAC
CAAAAGAAGACGACCAGAGTGGAGAGAAATAGAACGGGGAGGAGGGAGATGAGAGACAGGGATTGGGAAA
GAGAGAGAGAGAACAGATCAAGGAGCTACTGGGCTCCCCGCTGAGCCTAAATCCATGGTTTATAAAACAG
GGCACAGTTGGAGGAGCTTCAAGTGAGCCCAGCCCAGTCTAGACCCCAGTGAGCCCCTTGTATCACCCCC
CAGAGCCTGTCACTTTCCCACCCCCATATGCATCCCTACTTTTCTCCCCCAACTGCCTCTCCTCTCCCCA
GTGTCTCCTCCACCTGCCTGCCCTCCCTAGTGGAAATCTTTCCCCCTCTCTCTTTTATTATTATTATTAT
TATTATATATTTTTTGAGACAGAGTCTTGCTCTGTCGCCCAGGCTGGAGTGCAATGGCGTGATCTTGGCT
CACTGCAACCTCCGCCTCCTGGGTTCAAGCGATTCTCCTGCCTCAGCCTCCCGAGTAGCTGGGACTACAG
GCGTGCACCATCATGCCCGGCTAATTTTTGTATTTTTAATAGAGATGGGGTTTTACCATGTTGCCCAGGC
TGGTCTCGAACTCCTGACCTCATGTGATCCACCTGCCTCGGCCTCAAAGTGCTGGGATTACAGATGTGGG
CTACCACGCCCAGCCTCTCTCCCTTTTAAATTATTATTTTTAGACATGGGATCTTACTACATTGCCCAGG
CTGGTCTTGAACTCCTGGGCTCAAGGGATCCTCCTGCCTTAGCCTTCCTAGTAGCTGGGATTACAGGCAT
GTGCCTCTATGCCTGGTACTCTCGCTGTCTCCTTGTGTCTCTCTATTTCTCTCCATCTGTCCAGACTCTC
CTCTCTTGCTTTCATGCCCATCATTTCTTCCTCTCTCCTCTCCCTTCCTCTCCCTGTATGAGTCCCTCCA
GCTGTGGGTGCCTTTCTCAGCCTCTGTCAGCATCCCCTCCACCCCCGATCCCGTCACATTCTACCTCTTG
CCCCTTCCCCTGCCCACCCCCTTCACAGAGAGTCCCCACGCCTGCAGGCTGGACCTCCTCCAGGAGCCAG
GCCCAAAGCTCCTGCTGGGCACATTCCTGAGTGTTCCTGAGCCTCTTTCAGTCCCAGGGGTGAGGTGCTG
GGTGGGTGCGCTCCCTGGGGGCTGGGTGGGGCTGAGGATGTGAGCGAACAAACCAGACCTAGAAAAAAAA
AAGACAGAGATGGAAGCAGAGATGAAGGCCCAGAGAGAGGGGTTCACTTGCCCAGGGTCACACAGCTCAG
GAATCTGAACCTGGCTCAAACCAGCATTCACTTCTCTCAAGGCCCACCCAAGGGCTGCAGTGCAGTGGCA
CAATCTCAGCTCACTGCAACCTCTGCCTTCCAGGTTAAAGGGATTCTCCTGCCTCAGCCTCCCGAGTAGC
TGGGATTAGAGGTGCGTGCCACCACACCCGGCTAATTTTTGTTATTTTAGGAGAGACGAGGTTTCCCCAT
GTTGTTCAGGCTGGTCTCGAACTCCTGACGTCAAGTGATCCACCTGCCTCGGCCTCCCAAAGTGCTGGGA
TTACAGGCATGAGCCACCGCGCCTGGCCAGGAACAGTCTTTACTGACATGTGTTTAGGGCCATCGCACTT
CCCCCGCTCTTCACGGGAATTCTCTCTTCACTGGCTCCACTCAGGTGCCTTTTGTGAGACAGAAATTCAA
GCGATGAGGACAGAGATACAAACCCGGGATGGGAGGCTGTGACATCTGCCCATAGAAACACAATTCTGTT
TCTAGGAATTTATCCTTCAACTCGCTAGTACACGCTCTTCAAGACATACTGAAAAAACATGAAGGATTAG
AACAGTGGGTGTCGAATGCTACCATTTGTCTTGGAAATCAAGCAAAACGAACGTGGGTATGGTTGCCGAC
GCATGGACCATCTCCAGTGGAACAAGGAACTGCCAACGTTGATTGCATTTGGGAGGGAGATGAAGGGCTG
GGATGGAAAGAGCTTTATTCTCAGTGCCTCATCTTTTGGTTGTTTTGGATTTTACAACATGTGCATGCAT
TGCCTACACAAACAAAGACACTAATTTGAAAAGGAAAAGGGGAGAAGAAAAGAGGGAGGAAAGAAAAGGG
GCCGGTGTGGCAGCTCACACCTGTCATCCCAGCACCTTGGGAGGCCAAGGCGGATGGATCACCTGAGATC
AGGAGTTTGAGACCAGCCTGGCCGACATATACTGAAACCCTGTCTCTACTAAAAAATACAAAAATTAGCT
GGGCATGGTGGCGCACGCCTGTAGTCCCAGCTACTTGGGAAGCTGAGGCAGGAGAATTGCTTGAATCTGG
GAGGTAGAAGTTGCGGTGAGCTGAGATGGCACCACTGCACTCCAGCCTGGGCAATAGAGCAAGACTCCGT
CCCTAAAAAAAAAAAGAAAAAAAAAAAGAAAAGAAAGAAAGGAAAGGGAGGGAAGAGCTCAGTGTGGGAG
AAGATTGGGGGTGGGAGTAGAGAATTAATGGAGGAAAAAGATGTGGGGGACAAAAGCAAGGTGTGAGAGG
TGTTGGCAATGGAAACTGAATACCTGTTGAGAAGAGCCAGGAGGGGGCGACATGGCTTTGAATCTCTTGG
GGCTGTGAGATTATGTGAAATGTGAGAAGACTGGACCTCAGTGGGGTGCCTGACATATATTCAGGTTACA
CCTCCCACAAGCAGGTGGGGCTGGACAATCTCTGTCAACCCTCCAGCCAGGACCCAAGTGTCTCCCTGTA
CATTACTTTTGGTTGTTGTTGAGACAAGAATCTCACTCTGCTGCCCAGGCTGGAGTGCAGTGGCATGATC
TTGGCTCACTGCAATCTCTGCCTCCTGGGTTCAAGTGATTCTCCTACCTCAGCCTCCCAAGTAGCTGAGA
CTATAGGCGCCTGCCACCACACCTGGCAAATTTTTGTATTTTTAGTAGAGACAAGGATTCACCATGTTGG
CCAGGCTGGTCTTGAACTCCTGACCTCAGGTGATCCACCTGCTTCAGCCACCTAAAGTGCTGGGGTTATA
GGTGTGAGCCACCGTGCCTCGCCCTCCACATGCATTTTGAGAGCCAGCTCTCTGGGTTGCTTTGTCCCAA
CTCACCCAGCCTTCTTTGAGGCTTCCCCAAACCCTGGGAGCATTTGACATTGCAGACTGAGCTGGACAAT
CAAGGGAGAGGTCTTGCTGACCTGTCGGGGCTGGTGGAGTCATCAGAGATTGTCTTTATCCTCGCCTTCT
TCTTCTCCACCTCCTCAACTTCCCCTCTTCTTCTGGGGCAATCCTGGAGGGCTTCTTGTAGGAGGCCTCT
CCCACCATCTGCCCAGCTCTTTCTTTCTAATCTTGTTCAATTGTGGGTAAAGGCACAGCTAGTTGGGAGC
TTGGGGAGTTTGATGGGGACAGGGGATGCAGGGAGAGGGAGGGGCAGGGAATGCTCTCAGGGTCCAAATT
TCCTTCCATTCTAGGGTTGCCTGTGCTCATCTGTCTGATGGCTTCTCTCTCTCCCTCTCATCCCTGCCTC
CTCTTTCCTACCTCTCCTCCTCCCCTTGTCTCTGTCTCTGACATTGCTTCTATCTTTCTTTTTTAACATC
TGTCTCTTTTGCTTTTTATCTTTGCCTGTCTCTCCTCTGTGTCTCTCTCCTTATGTCTCCATCTTGGTGT
GTCTCTGAATCTCTCCGTATCTCTGCCTCCTCCTCCCCACATCTCTCCCCACCTCCCTTCCCTATCTCTG
TCTCTCTCCACAGTCAAAAAAGCCAAGTTTGATGGTGCCCAAGGTAAGTGGCTTCTCTTGCTGTCCTGTC
CCGTGTTGTCTGTCTGTCTGTCTGTCTCTTGGAGAGACTGGGAGGGGGTCCCAGCCCAGACTTAGAGTTG
GGCTTTATGTCTTCTGAGCATCAGGAGAGGGGTCAGAAGATTAAATAGGGGGAGGGGCAGCCATTGGCCT
GGGGTCCCTGCAGTTTGTATGGGGGTCCCCGGGTCTCCCCAGCCATCCTTGGAGAGTCTGTAAGGGGTGG
GGCTTGCCCTGAGCCAGTGGCTCTTCCCAGGGTCCTAAGAGGTAGAATGGGGACTCTTAGATGGGGCTAC
AGGTGGGAAAAATGAGGCTCAGAGAGGCGAAAGGAGTTTCTTTCTTTTCTTCTTCTTCTTTTTTTTTTTT
TTTTGAGACAGAGTCTCCTTCTGTTGCCCAGGCTGGAGTGCAGTGGCGTGATCTCGGCTCACTGCAACCT
CTGCCTCTGGGTTCAAGCAATTCTCCTGCCTCAGCCTCCCAAGTAGCTGGGATTACAGGCGCCCTCTACC
ACGCCCGGCTAATTTTTTTATTTTTAGTAGAGATGGGGTTTCGCCATGTTGGCCAGGCTGGTCTCAAACT
TCTGACCTTAAATGATCCGCCCGCCTCGGCCTCCCAAAGTGCTAGGATTGCAGGCGTGAGCTACCGTGCC
CTGCCTTTTTATTATTATTATTTTTATTTAAAATTTTTATTTTTTGAGGCTGGAGTGCCGTGGTGCAATC
ATGTTTTACTACAGCCTCAACCTCCCAGGCTCAAGCAATCCTCCCACCTCAGCCTTCCAAGTAGCTGGGA
CCACAGGCGTGCACCACTGCACCCAGCTAATTATTTTTTTGTATTTTTTAGTAGAGATAGGGTTTTGCCA
AGTTGCCCAGGCTGGTCTTGAACTGCTGGGCTCAAGCAATCCTCCCCCCTTGACCTCCCAAAGTGCTGGC
ATTATAGGCGCGAGCCACTGCACCCAGCCTGCAAAGGGGGTTTCTTACAGTCAATTTTGTTCCCCTTTTC
TGGGACCTCAGTCTTTTTAGCTGAAAACCAATGGCATGGTCATTTCGAAGCAGCTGGATGAAGTATCCCA
AAATTCCACGTCTCCCCACACTGAGGCCCCTCCCTTGTGCCCTGAGGGTGGGGTTGTGGGTTAGGGGGTG
AGTGGCCCAGAAATTCCTGAGGGGATCACAGCAGATGGTCTAGAGCTTGGGAAGGGGCATTGGAGAGTCC
CTGAGCCCCAGCGCTGACCCCTACTCTCACTGCCACAGAGAAATTCAACACGTACGTGACCCTGAAAGTG
CAGAATGTCAAGAGCACGACCATCGCGGTGCGGGGCAGCCAGCCCAGCTGGGAGCAGGATTTCATGTTGT
GAGTCTGCAGCGTCTGGCATGACCTCACTCCCTGGCATAGCCCAGCACCTCGCTGGCCCCTCAGGGCAGA
GCTGGACACTGGGGAATCCCGGGTGACTCCCCTCTGTCCTCCCTCTTCCCCTGTCCACCTTATCACCTTC
ACCTCCAAAACACATCCCCAATCCAATCACTTCCCTTGGTCTCCGCAGCCACCAGCCAAGTCCCTGCTGC
CCGCCAGCCTCCGCCCTGGCCTCCTGTGCCATCCACCTCCTACAATCTGTTCTCCTCCAGGCAGCCAGGG
GGATATTTTTAAAACTGCAAATCACATCCTGTCGCTCCCATGTTCCAAACTTGTCCGTGGCTCATCGACC
TCACAATAAAACCCACAGCCTTCCCCGTGATTCCCACCAGGTTCTCGCTCTATCTCCCTCACCTGCCCCA
GCCACACCCACCTCTGCCCCTTTCTCCAACACTTCCCAGCTTGTTCTTGCCCCAGGGCCCTTGCACTTGC
TCTCCTGTCCCCAGCTGGCTCTTCTCCTTCAGGTCTCAGCTTGTGTCACCTCCTCAGTGAAGCCCTCCCT
GACCACTACCTCCAAGCTACAATTTCAGGGCATCATGCCTTCCCAGGCCTTGCCACCAATTTTGTTTGTT
TGTTTGTTTGTTTTGAGGCAGAGCCTCACTCTGTTGCCCAGGCTGGAGTACAGTGGCATAATCTCGGCTC
ACTTCAACCTCCACCTCCCAGGTTCAAGTGATCCTCCTGCCTCAGCCTCCCAACTAGCTGGGATTACAAG
CGTGTGCCACCACACCCGGCTAATTTTTGTGTTTTAAGTAGAGATGGTGTTTCACTATGGTGGCCAGGCT
AGTCTCAAACTCCTGGACTCAGGTGATCCGCCCACCTCAGCCTCCCAAGGTGCTGGGATTATAGATGTGA
GCCACCATGCCTGGCCAATGGAATTTTTTTCCTTTTTTTTTTGTTTTGTTTTGAGACAGAGCCTCACTCT
GTGGCCCAGGCTGGAGTGTAGTGGTGCAATCTCGGCTCACTGCAACCTCTGCCTCCTGGGTTCAAGCTAT
TCTCCTGCCTTAGCCTCCCGAGTAGCTGGGACTACATGTGCGTGCCACCATGCCCGGCTAATTTTTGTGT
ATTTAGTAAAGACCGGGTTTCACCATGTTGGCCAGGCTGGTCTTGAACTTTTAACCTCAGGTGATCCACC
CGCCTCGGCCTCCCAAAGTGCTGGGATTATAGGCATGAGCCAGGAGCCACCAATCCCAGCCAACAGATAT
ATATATCAGATATATATATACTTTTTTTTTTTTTTTTGAGACTGAGTTTTGCTTTTGTTGCCCAGGCTGG
AGTGCAATGGCGTGATCTCGGCTCACCGCAACCTCCGCCTCCTGGGTTCAAGCAATTCTCCTGCCTCAGC
CTCCCGAGTAGCTGGAATTACAGACATGCACCACCACGCCCGGCTAATTTTGTATTTTTAGTGGAGATGG
GGTTTCTCCATGTTGGTCAGGCTGGTCTTAAATTCCCAACCTCAGGTGATCCGCCCATCTCGGCCTCCCA
AAGTGCTGGGATTACAGGCGTGAGCCACCGTGGTTGGCCATATTTTAAAAATATATTTCTTAAGATAAAT
CTTTGGTAAACTGTAAATTCAGTGAATCTCACATTTCACCAAGTTTCCTGCTCCCCCGAATTCACATATG
TCTAGGGCGAGGCCTGCAGGGAAAGTGCTTTGAGGTGGGATCGTGTCCTCACATCATTAGATGGGGATGA
CACTGGGAAGGACAGAGGTGACCCGAATGTCCTTATCCTGTAGGTAAAGGGAGCTATGGAGGGTATTTGA
GCCTCTTCCTCACTTACCCAGCATGGTCAGTGTTGGAGGGCCCAAGGAAGGGCTCAGAAAGATGAAGGTG
CAGGCGATGTGTAACATCTGTCCCCACGCCATCCTTCCCGGCTTTGAATCCTGGTTCTTTTGTGATACCC
CGAGCTCTTAACTTCCCCCACTGGCCTCAGTTTCCCCTCTATAAAATGAGAACCACCATGTTACCCTACC
ACCTAGGACACTCCCAGGCCTAGGTTTGAATTGCAGTATGCTGTGTGTTCTCAGGCGAATCAACTAAACT
CCCTGGGCCCCCGTTTCCTCCCTCCTGCTCCCTCGACGCCCCCTCTCCTTTTTCTGCAGCGAGATTAACC
GTCTGGATTTGGGACTGACGGTGGAGGTGTGGAATAAGGGTCTCATCTGGGACACAATGGTGGGCACTGT
GTGGATCCCACTGAGGACCATCCGCCAGTCCAATGAGGTGAGTGGCGGGTGGCCTGAGGGTGAAGAAGGA
GGAGTGCCTTGCAGAAGCCCAGAGACCAGTGGACTAAACAAGATGGGCATTTATCTCCTATCCCCTGACA
ACATCAATGTAGACACTTGGGATTGCCACGAACCTTCCAAAGTCACTAGAGCCTATACACCTTCCATCTT
GCTCTGCCTCTCTCTCCATGTGGCTTCCACCTTGTGGCCCCAAATGGCTGCTTTAGGCTCACCATTGCAT
CTTCATTCCAACCACCGAAAGGTGCTGGTGGTGGGGGAGGGGGGTGGTTCATGCACATCTCATTGGCCAG
AACTTAGACATGTGGCCAACACCTTGCTGCAAGGGATTCTGGGAAATGTAGTCCTAGGCTGGAAAATGTA
GTCCTGGGCTGTGCTTCCCTAGGCACAGCTAAAAATGTATTACCTTGGAAGGAGAAAAGGGATAATATAG
GCAATTAGCATTTTGTGTCCCAGATGGGCAGCAGCAGGAAGCTTACACCAACTCATAAGAAGGTGCTAGG
TAACAACCCTGGCCCCTCAGCCTGTGCATCATTGTCAGCAGGTAGTAGTGATGTCTATTTTTTATTTAAT
TATTTATTTTTGAGACAGGGTCTCACTCTGTTGCCCAGGCTGGAGTGCATTGGCATGATCATGGCCCACT
GCAGCCTCGACTTCCCAGGCTCAAGTGATCCTCCCACCTCAGCCTCCTGAGTAGCTGGGACTGCAGGTGC
ATGCCACCAGGCCCCCCTTATTTTTTTTGTATTTTTAATAGAGACAGGGTTTTGCCATGTTGCCCAGGCT
GGTTTCGAACTCCTGGGCTCAAGCAATCCACCCACCTCAGCCTCCCAAAGTGCTGGTATTACAGGTGCGA
GCCACCATGCCAGGCCGTGGTCATGTCTATTCATCTGTCCCCACAGCCCAATCCCTGGCCTCCTAACCTC
AAGTCTCAACCTCTCCATGCTGACCCCAGGAAGGCCTTATTAGCTGGAGCTCTGATCTGTCCTCCCCTGT
CCATCTGCCTTGGGAGGCCCTTCAGATGGCACCTGCCCACTAGCCTCATCTCCCCCCACACTCTAACCTC
TACCCCTCCCAGATTCCACCCTCTGAACCTTTGCATAGTGTGTTCCCTGAGCTTCAAGTGTCCTCCTTTC
CATCACCTTCTAAATTCCCATGTGCCCACCTCCAGGAAGCCCTCTCTGACTTCTCTCTAGATCCTTTAGC
CCTCCTTCCTCCCTCTGGGCTATGACCTCATGGGGCTGGGGGTGCCTGTGTCCAGCCCTGTTTCCAAGGG
CTATGGGCTCTCAGGAGCCAGGGTGATGATGGCTGGGCCTCTTGGGGACCCTGGCATCACCCAATATGAA
CCAGGCATAGAGGAGGGACTGGGGACTGTTTTTTGTTTGTTCGTTTTTGTCATTTTATTTTATTTTATTT
TATTTTATTTTATTTTATTTTATTTTATTTTATTTTACTGTGAGATGGAGTCTCACTCTGTCACCCAGGC
TGGAGTGCAATGGCACAATCTTGGCTCACTGCAACCTCTGCCTCCCTGGCTTAAGTGATTCTCCTGCCTC
AACCTCCTGAGTAGCTGGGATTACAGGGGCCTGCCACCACACCCAACTAATTTTTGCATTTTTAGTAGAG
ATGGGGTTTCGCCATGTTGGCCAGGCTGGTCTTGAACTCCTGACCTCAAGTGATCCGCCCACCTTGGCCT
CGCAAAGTGCTGGGATTACAGGTGTGAGTCACCGCACCTGGCCAGTGAGTGTTTGTTTTTGAATGAATGA
ATGCAGAGGGACGAAATGGTTGCAACAATCTAGGTAAGCGAGTCTAAAAGGAAGCCTTGGCTGGGCATGG
TGGCTCACACCTGTAATCCCAGCACTTTGGGAGGCTGAGGCAGGTGGATTGCCTGAGCTCAGCAGACCAG
CCTGGGCAACATGGTGAAACCCCGTCTCTACTCAAAAATACAAAAAATTAGCCAGGAGTGCTGGCACGTA
CCTGTAATCCCAGCAGCTCAGGAGGCTGAGTTAGGAGAATCACTTGAGCCTGGGAAGCGGAGGTTGCAGT
GAGCTGAGATCACGCCACTGCACTCCAGCCTGGGTGATAGAGAGACTCTGTCTCAAAAAAATTAAATTAG
GCCGGGCATGGTGGCTCATGCCTGTAATCCCAGCACTTTGGGAGGCCGAGATGGGTGGATCACGAGGTCA
GGAGATTGAGACCATCCTGGCTAACACGGTGAAACCCCGTCTCTACTAAATATACAAAAAATCAGCCAGG
CGTGGTGGCGGGTGCCTGTAGTCCCAGCTACTCGGGAAGCTGAGGCAGGAGAATGGCGTGAACCCAGGAG
GCAGAGCTTGCAGTGAGCCGAGATCGCGCCACTGCACTCCAGCCTGGGCGACAGAGCGAGACTCTGTCTC
AAAAAAAAAAAAAAAAGAAAAGAAAAGAAAAAAGAGAGAGAAAGGAAGGAAGGAAAAGAAAGGAATAAAG
GAAGGAAGGGAGGAAGGGAAAGAAAGAAAGGAAGGAAGCAGGGAGGGAGGGAGGGAAGGAAGGAAGGGAA
GGAAGGAAGGACGGAAGGAAAGATAGAGAGGGGACATGACTTTGGTTTTGGGGTAGGGGTGAGGGGGATG
TCTCATGCGAGAGTAGGGGCCCTGGGGACTAGTGACCAGCAGATTCCTGACCCACACACCTCCTCCCCCA
ACCCCCAGGAGGGCCCTGGAGAGTGGCTGACGCTGGACTCCCAGGTCATCATGGCAGACAGTGAGATCTG
TGGCACCAAGGACCCCACCTTCCACCGCATCCTCCTGGACACGCGCTTTGAGCTACCCTTAGGTGAGTAC
AGGGGCCCGGGACCTTCACCCAGCCCCAGCCCCAGTTGTGGACTCACTCAGCTATTCCAGGAGAGTGAAC
AGGCCTGGGTAGGTCTAGCTGACCCTTCAGGCTGAGAATGAGGGTCCTTCGCCCCGGAGGAGAGAGAGTT
TCTTGGGTTGCAGAGAACAGGGATGTGAACCTGCTGGGTGCGGGCCATGACCTGGGCCCCGTAGCTTCCC
AGTGAGCTGCAAGTGCTTCACGACCGAGGGCGTTCAGGGTTGAGCTATCCTGGCTGTTCCTTGGTGATGC
CTGAGACTGCAACAGTGAACTGGGGATAGGAGGAGAGACAGACAGAGACAGAGAGACAAAGAGAGACAGA
GAGAGACATGTAGACAGAGGCTGAGAACAGATAGTCCCCTCTTCCTTTCCTGGAAGCACCTTGAGTCTCT
CCACCTCATTCTTCTAAGAACCCATGGCTGGCCAGGCATAGCTTCTCATGTCTGTAATCCCAGCACTTTG
GGAGGCCAAGGGGGGAGGATCATTTGAGGCCAGGAGTTTGAGACCAGCCTGGGCCATCTAGTGAGATCCC
ATCTCTATGAAAAAGTTAAAAATTCACCAGGCATGGTGCTGGGTTTCTGTAGTCCCAACTATTTGGGAGG
CTGAGGCAAGAGGATGGCTCAAGCCCAGGAGTTTGAGGCTTCAGTGAGTTGTGATTGTGCCACTGCACTC
CAGCCTGGGTGACAGAGCGAGACCCTGTCTCTAAAAAAATAAAAATAAAAACAATGGGCTGGGCGTGGTG
GCTCATGCCTATAATCCCAGCACTTTGAGAGGCCGAGGCAGATGGATCACCTGATGTCAGGAGTTTGAGA
GCAGCCTGGCCAACATGGAGAAACCCTGTCTCTACTCAAAATACAAAAAAATTAACTGGGCATGGTGGTG
CACACCTGTAATCCCAGCTACTCGGGAGGCTGAGGCAGGAGAATCGCTTGAACCCAGGAGGTGGAGGTTG
CAGTGAACTGAGATTGTACCACTTCACTCCAGCCTGGGCAACAGAGTGAGACTCCGTCTCAAAAAACAAT
TTAAAAATTAAAAAATTAAATAAAAACAATGGCTTCCCCACCCTCGTAAAGGCTAGGAACCATCTCCTGT
CATCCTCCAACTATTCTCCATTCAGCTCTGGGAAGAGGGGCGTCAGAGGCACCACGGTACCTCCCCTTCA
TCTCCATCCACCCTCCTGAGACCGCAGACCAACCCACCCCTACTTCTGAGGCTTTGCCAAAGACCCCAGA
AGCCAGGGCCCGGGTGGAGCTCAGTAGGCCTGGAGGATGGAGGCTGAGCGGCAGGGAGGGTCTTCCAGGC
TCACAGACAGGGCTCTGCTTGCAGACATTCCTGAAGAGGAGGCTCGCTACTGGGCCAAGAAGCTGGAGCA
GCTCAATGCTATGCGGGACCAGGATGAAGTGAGTGTTGGGGTGGGAGGGGACTGTTTCTTCCTTGTTTCT
GTCTCTGTCTCCCCATGATTTTCACTTACAGATGCTGTTTCTCTCTAAGCTTGTCTTTCCCTGCATCTCT
GTTTCTAACTCTTTGTAACCTGACTGCATCCATGACCCATGTGGTCCAGTCTCTAGACAATGATGGGGTC
AAGAAACACACAGAGGCCAGGCGCAGTGGCTCACGCCTGTAATCCCAGCACTTTGAGAGGCGAAGGTGGG
CAGATCACCTGAGGTCAGGAGTTCAAGACCAGCCTGGTCAACACAGTGAAACCCCGTCTCTACTAAAAAA
AAAAAAAAAAAAAAAAAATTAGCCAGGCTTAGTGGCTCACACCTGTAATCCCAGCAATTTGGGAGGCTGT
GGCGGGCAGATTATTTGAGGCCAGGAGTTCGAGACCAGCCTGGCCAACACGGTGAAACCCCGTCTCTACT
AAAAGTACAAAAAATTAGCTAGGCATGGTGGCGGGCGCCTGTCATTCCAGCTCCTTGGGAGGCTGAGGTG
GGAGAATCACTTGAATCTGGGAGGCAGAAGTTGCAGTGAGCCGAGATCACGCTGCTGCACTCCAGCCTGG
GCAACAGAGCAAGGCTCTGTCTCAAAATAATAATATTGATAATAATAATAAAATAAAAAATTTTACTTTT
CATTTGGCGGATACATGTGCAGGTTTGTTACACGAATATATTGCATGATGCTAAGGTCTGGAATTCCATG
GCATTACTCAAATTGTAAACACAGTACCTAACGGGTAGTTTTTTCACTCTTGTCCTGCTCCCTCCTTCCT
CCCTTCTGGAGTCCCCAATGTCTACTGTTCCCATCTTTTTTTTTTTTTCTTTTTTGAGACGGAGTCTCGC
TGTGTCACCAGGCTGGAGTGCAGTGGCACGATCTTGGCTCACTGCAACCTCCACCTCCCGGGTTCAAGTG
ATTCTCCTGCCTCGGCCTCCCGGGTAACTGGGACTACAGGCATGCGCCACCATACCTGGCTAATTTTTGT
ATTTTTAGTAGAGACGGGGTTTCACCGTTTAGCTAGGATGGTCTCGATCTCTTGACCTCGTGATCTGCCC
GCTTCGGCCTCCCAAAGTGCTGGGATTACAGGTGTGAGTCACTGCACCTGGCCCCTAGTCTTTTTTCTAT
CTCTGTTTCTTACTTTTTCTGTCTCTGTCTCTGTCTCTGTCTTTCTCTCTCTCTCTCTCTCTCTCTCTCT
CTCGTGTGTGTGTGTGTCTTTCTCTCCTTTTCTCTCTTACTCCCTGTATCCTTCTCATAGAGAGGGAGAG
AATTTGGGAGGTAGAGGGAAGTCGGGATGGGACAGAACAGAGGACTATCCTGGTCCCCTGGCCTTTGGCC
CCTCTGAGAGAAGCCCTTTCTCCTTCCTCCACCCCTTCAGTATTCGTTCCAAGATGAGCAAGACAAGCCT
CTGCCTGTCCCCAGCAACCAGTGCTGTAAGTACCTCTTGATTCTTCCTTGGGTATCAGCTGAAATCCTCA
TCCCTCCCCTACCCCATGACTGTCCTGTCTAAAGGCTCCTCCAGTCCGGAGATACAAGTCCTGAGAGTGC
AGTGTCCACTTACAGTGTATTAGAAATCAGCGTTCTGAGGCTGGGCATGGTGGCTCACCCCTGTAATCCC
AGCACTTTGGGAAGCCGAGGTCAGGAGTTCGAGACCAGCCTGGCCAACAGGGCAAAACCCCATCTCTACT
ATAAATACAAAAAAAATGAACAGGCATGGTGGTGGGTGCCTGTAATCCCAGCTACTCAGAAGGCTGAGGC
AGGAGAATTGCTTGAACCCAGGAGGCAGAATCTGCAGTGGGCCAAGATCATGCCACTGTACTCCAGCCTG
GGTGACAGAGCAAGACTCTGACTCAAAAAAAGAAGGAAGGAAAGAAAGAGAAAGAAAGAGAGAAAGAGAG
AGAGAGAAAGAAAGAAAGGAAGGAAGGAGAGGAGAGGAAAGAAAGAAAGAAAAAGAAAGAAAAGAAAAGA
GAAAAGAAAAGAAAGGAAGGGAAGGAAAGAAAGGAAAGGAAGGAAAGGAAAGAGAAGAGTTCTGAGACTT
GGGCTTGATGAAAGACAAGAAGGAAGAAAGGAAGGAAGGAAGGAGAGTTCTGAGACTTGGGCTTGATTCC
CACCTTGCTATGTGGTCATGGGCAGGCCAGTGTCCCTCTTCGATATTTAGGGGCCCTCTCTTTGAAATAG
CGCATCTGACAGCCCCCTCACTCTGAGGGCTGTTGGAAGGATCTGGGACATCTAGAGACATGAAAAACAC
TTCGTAGATGCTTCACTTCCATTCATCAGATCCTGGATGAGGGCGTATAACTCATTCCACAAACTATTCA
TGGGGCCAGCACAAACCCCGAGCAGCCCACGTCAGATGGTGCAGACAGACACAGGCAGAAGATCCTGCCA
GCACATGTACAATGGGCGCACGTACAACAGACGAAGGCTGTTTCACTAACCCATTTTCTTAGATGGAGAA
ACTGAGGCCCAAGAGGAGATGTGATTTACCCAAGGCCACACACCCGGCAACTGGCAGAGCCAGGATTTGA
ACCCAGGTCTGAGGGACTCCAACTTTGCTTCCCTTTCCACTGCACCTTGTCTGTTAATGATGATGATGAT
CACGTTCCTCTTCCTATTTCCATCAAGGCTGCAGTTGTCAAGATTTTTTATCTTCCTGGGCCTTGTGGAC
ACTCAGATGCATCCAGACCAGGTCTTTTCATGGATGGAGGAGCTGTCTCCCTCCTTAAAATGACTTCCCA
TTGCTCTGTGGTGGAGGGGAAGTAGCAAATCATATAGCCTCAGGGCAGAGCTCCCACCTGCTGACACCAA
AACCCCACTGCACTCTTTAGCCTCCTTCTCCTTTCCCATTTACTTTCTTTTCTTCTTCTCTTTTTTTTTT
TCTTGGAGATAGAGTCTCCCTCTGTCACCCAGACTGGACTGCAATAGTACTATCTTGGCTCACTGCAGCC
TCTGCCTCCCGGATTTGAGTGATTCTTGTGCCTCAGCCTCTTGAGCAGTGGGGATTACAGGCACATGCCA
CCACGCCCAGCTAATTTTTGTATTTTTAGTAGAGATGGGGTTTTGCCATGTTGGCCAGGCTGGTCTCAAA
TTTTTTACCTCATGTGATCTGCCCACCTCAGCTTCCCAAAGTGCTGGGATTACAGGTGTGAGCCACCATG
CCTGGCACCTTTTCCATTTGCTTTTCCATCTTCCTTTTCTCCCCTCTCACAGCTCTCCCTGTATCTGTGT
CTCCCTCACCATGTGTCCAGGAGGGTGGTAATGGAACCGGGGTTGAGGAGGGCTTGGGATACTCCAGCTG
GGGTACCCTGTTTCCACACTAACTTGGGGAGTGATATTGAGAAAGTTCCTTGGCTTCCCTGGCCAGGGAG
GGGTCATCACTGCCTGGAAGGAATTACAAACCCCCGCTTGGTGAATGGGGTCATTGAGAGGTTGCAATGG
GGGCGGGGCCAGGCAGAGTGGAGGCAGGAAGGCAATGGCAGAGAGCCCCTGGGCAGATGGACTAGAGCTA
GGGGCAGGTTCATTTTGGGAAGTGGAGACCACCACTCAGTATTTACCCACAAGTCCTCCCTTGGAGTATT
TTGTCACCCTATTTCTCAGAGAAAGCAGCCAATGGTCAGAGGAGCCAGGATTCTGGTCCAGGACATTTTT
CTGAAGTGCCAGGTACTGCACGTGATAGGCAAAGGTGGTTCTCGCCCTGGCCCTGATGCGCAGAGGCTCT
GTGACTTTGGGCTGCTCACTCCATCCCTCTGAGCCCCATAGTTTCACCCATAAAATGAGTAGAATGATAA
AATCCACCCAACAGGGGTGTTTCAAACCTTAGGGTTTCCAATTTAGTGTGTCTTTCCTTATCCAAGAGCT
GGGAGAGGAAAAGGGTGGAGACTGGGAGACTGCTAACCCTAGACATCATAGTCAGAAAACCCTGGGCCCA
AATACCCACTTTGTTACTTCCTGACTGAGCCTTTCCTCTCATTGAAAACTGAGCCAGGCACAGTGGCTCA
TGCCTGTAAATCCCAGCTACTCGGCCTCACTTGAGACCACGTGTTTGAGACCAGCCTGACCAACATAGCA
AGATCCATCTCCACACAAAAAAACAAAAAGAAAACCACCAAGAACCAAAACATTAGCTGAACATGGTGGT
GTGTGCCTGTAATCTCAGTTACTCAGGAGGCTGAGGTGGGAGGATCACTTGAGCTTGGAAATTGGAGGCT
GCAGTAAGCCGTGATTGCACCACTCTACTCCAGGCTGGATGACAGAGTGAGACCGTGTTTCAAAAAAAAA
ATTAAAGAAAAGAAAAAAATAAACAAACAGGGATATCCCACCTTCCTCCCAAGGTGGAGAGCAGAGACAC
AGCAAGTGTCAGCAATGAAGGTGATACTCAGGGAAGGTACTCAGGACAAGAGGGACTTTTGGGGTGGGGG
GAGCAGTTGGGGAGAGTGAGGACAGCAGGGGAGCCCCCTTCCTACACCCACCCCTCTGTCTGCTCCCTTT
TATTATTTCTGCCCCTTCTCTTTGTAGGCAACTGGAATTATTTTGGCTGGGGTGAGCAGCACAGTAAGTA
CTCAGCCTGATTGATGTTCTGGGAGTTACATGGGAAGGTGGGCACCTTGGTGATCCCAAGGCCCCTCCCC
ACTACCACACAGGGAAGCAAGGAGCCTGTGACGAGCACGTGGGGGCCAGAGGGCTCAGCAAGACCCCTTT
CAAGCTTTCCTGTACCCTGTTCATTAGTGCCTGTCTTGGGAGGCCTGCCATCTGCTGGGGAGTGGGCACC
GTCATTGGGGTGGGGTGGGGGGGGTTAGCCTGGAGGAGTGGACATTTAGACCAACAACCTGCTTGTCTCC
AGCTGGGCACTGTGACCCCCGCACCCCACTCCGCCGTATAACCTCACCTCCTCTCCTGTAGCCCCTGCCT
TTTGGTCTTCCTATCTTCCTTCTCCACTTGGAAATGTGTCCAGTGTCACTCAGAGGGTAGTGGGTGGGCG
GGGTCTCTAACAGAACGGCAGGCCAGGGACCTCAGGGAGATGCACACAGGGACCTCAGCACCCCCCAGGT
CCACCCACACTCACACCTCACCTTCCACCTTCATTTGCTCTCCCAGGGAATAAGGCAAGCCACCCCCTCC
CTAAATTAAATGTCCATTTTCCTTTTCCTTTTTTTTTTTTTTTTTGAGACGGAGTCTCACTCTATCACCC
AGGCTGGAGGGCAGTGGCACGATCTCAGCTCACCGCAAGCTCTGCCTCCAGGGTTCACGCCATTCTCCTG
CCTCAGCCTCCCGAGTAGCTGGGACTAAAGGCGTCCGCCAACACGCCCGGCTAATTTTTTGTATTTTTAG
TAGAGACGGGGTTTCACCGTGTTAGCCAGGAGGGTCTCGATCTCCTGACCTCGTGATCCACCTGCCTTGG
CCTCCCAAAGTGCTGGGATTACAGGCATGAGCCATGGCACCTGGCCCTAATTAAATGTCCGTTTTTCTAC
CTAACAGCGGTTCCCAACCTTTTTGACACAAGGGACCAGTTTCATGGAAGACAATTTTTTTATGGACTGG
GGTTGGGGGATGGTTTCTGGATGATTCAAGTTCACTGCATTTGTTGTGCACTTTATTTTTATTATTATTA
TTATTACATTATAGTATGTAATGAAATAATGATACAACTCATCATCATGTAGAAGCAGTGGGAGCCCTGA
ACTTGTTTTCCTGCAATTAGACAGTCCCATCTTAGGGTGATGGGGGACAGTGACAGATCATCAGGCATTA
GATTCTCATAAGGAGCACACAACCTAGATCCCGCACATGCACAGTTCACAGTAGGGTTCACGCTCCCGTG
AGAATCTTTTTTTTTTTTTGAAACAGAGTCTTGCTCTGTTGCCCAGGCTGGATGGAGTACAGTGGCGCAA
TCTCGCCTCACTGCAACCTCTGCCTCCGAGTTCAAGTGATTCTCGTACCTGAGCCTCCCAAGTAGCTGGG
ATTACAGGCGCGTGCCACCATGCCCAGCTAATTTTTTGTATTTTTAGTAGAGATGGGGTTTCACCATGTT
GGCCAGGCTGGTTGTGAACTCCTGACTTCAGGTGATCCACCTGCCTTGGCCTCCCAAAGGGCTGGGATTA
CAAGTTTGAGCCACTGCGCCCGGCCTTCTATGAGAATCTAATGCTGCCGCTGATCTGACAGGAGGTGGAA
CTCAGGCGGTAATGTGAGTGATGGGGAGCAACTGTAAATACAGATGAAACTTCACTCGCTCACCCAACCG
CTGCCCACCTCCTGCTGTGCGCCCCAGCTCCTAACAGGCCACAGACCAGATCCATGCCCTAAAGAGTTGC
TCCCTTTCTCCCATACCCCGCCTCTTCTAGAGAAATCCAGTCCTCTATTCTTTCTTTCCTTCTTTCTTTT
TTCTTTTTTTTGAGATGGAGTCTTGCTCTGTCACCCAGACTGGAGTATAGTGGTGCGATCACTGCTCACT
GCAACCTCCACCTCCCGGGTTCAAGCAGTTCTCTTGCCTCAGCCTCCCGAGTAGTTGGGATTACAGGTGC
ACGCCACTATGCCTGGTTAATTTTTGTATTTTTAGTAGAGATGGGGTTTCACCATGTTGGCCAGGCTGGT
CTTGAACTCCTGACCTCAAGCAATCCTCCCGCCTTGGCCTCCCAAAGTGCTGGGATTATAGGTGTGAGCT
ACCATGCCTGGCCAGTCCTCTATTTTGAGGATAAATCTGCCTCCTTCTCTCTCCTTCAACTGGGGAGTCC
TTCACTCCTTCCTCATATCCTGGTGGACAAACCTAACTCCAGGACCAGTGAAACTGTTGACAAACACTTT
GGTCCACCACAATTTATCAAAAACAAGTTGGTTAAAAATCAACTTAGGCCAGCCACACTGGCTCACACCT
GTAATTCCAACACTTTGGGAGGCTGAGGCGGGAGGGACGCTTGAGCTCCAAAGTCTGAAATCAGCCTGGG
CAACAGAGCAAGACTCCATCTCTACAAAAAAAAAAAAAAAGGGCCGGGTGTGGTGGCACGCCCCTGTAGT
CCCAGCTATTTGGGAGGCTGAGGTGGGAGGGTTGTTTGAGCCCAGGAGGTTGGGACTGCAGTGAGCCATG
ATTGTGCTACTAGACTTTAGCCTAGGCAACAGTGTGAGACCCTGTCTCTAAAAAATAAATAGATTAAAAT
AAATAAATAAAATCAATTTTGCCAAAATGAATGCTTGGCAGACAGGGCAAGCTCGATAACAACCAACTTG
CCACAAACGAACAGTACGGTCAAAAGCAAAGATAGACCAGGCGTGGCAGCTCACACCATAATCCCAGCAC
TTTGGGAGGCCGAGGTAGGCAGATCACTTGAGGTCAGGAGTTCGAGACCAGCCTGGCCAACGTGACGAAA
CCCCATCTCTACTAAAAATACAAAAATTAGCCAGGCATGGTGGTGCATGCCTTTAATCCCAGCTACTCGG
GAGGCTGAGGCAGGAGAATCATTTGAACCTGGGAGGTGGAGGCTGCAGTGAGCCGAGATCGTACCATTGC
ACTCCAGCCTGGGTGACAGAGCGAGACTCTGTCTCAAAAAAAAAAAAAACCCAAAAACCAACAAACAAAC
AAAACAAAACACCAATGCAGCTAAAGCTGATAGATAATTGGGTCAAAAAGGAAAGACAATTGAACCGAAA
ACAGACCGTTGGGTTAAAACAAAAGTGGTTGAAAATAGCCAGAAGCAGGCAATTTAGTCAAGAGCTACTT
AGTAGAAAGCAGAGCCTGGGCAAAAGCAAAAAGAATCCAACTCAAAGTAATTTACCCTTCATAAGCAGAT
AATTTGTCAGGAAAAAAAAAAACTGGGTAAACATGTGCACAGCCTCATGCAATTTGGCTGGAAACATCTC
AGCCCGGTCAAGGACAATTGGATAGAAAGAATGCTGGCCGGCCGAGGTGGCTCACGGCTAATCCCAGCAC
TGTGGGAAGCTGAGGCGGGAGGATCGCTTGAGCCCAGGAGTTCAAGATCAGCCTGGGCAATATAGGGAGA
TCCCATCTCTACAAAATAATAAATAAATAAAATTAGCTGGGTGTGGTGGTGTGTGCCTGTGGTCCCAGCT
ACTGTGGAGGCTGAGATGCGAGGATCTCTTGAGCCCAGGAGGTCGAGGTTTCAGTGAGTTTTGATCGCGC
CACTGCGCTCCAGCCCAAGTGAGAGAGACCCTGTCTAAATGAATGGATGAATACAGCAAAAGTCTGAAGG
TTTCACTCATTGCTCTGAGATTTTGGGGTCTGGGGGTTTTTTCATTTTTTTACATCCTCTTCCCCTTACC
CGTACTTCTCATGTTTTCTTCATGGACTACTTTTTCTTTTTTTCTGGATACAGGGTCTCATTCTGACACC
CAGACTGCAGTGCAGAGGCGTAATCATAGCTCACTGCTACCTCGACCTCCTGGGCTCCAGCAATGCTCCT
GCCATACCCTCCCGAATAGCTGGGACTACAGGCGCCCACCACCACGCCCAGCTAATTTTTAAATTTTTTT
AAAGAGATGGGGCCTTACTATGTTGCCCAGGCTGATCTTGAACTCCTGGGCTCAAGTGATCCTCCTGCCT
TGGCCTCCCAAAGTGCTGGGATTACAGGCATGAGCCACTTTGCCTGGCCCATGGACTAGGTTTTACTTTA
CTTTTATTTTATTTTATTTTTTGGAGACAGGGTCTTGTGTCACCCAGCCCCTGGAGTGCAGAGGTGTGAT
CTTGGCTCACAGCAATCTCCACCTCCTGGGTTCCAGAGATTCTCCTGCCTCAGCCTCCCAAGGAGCTGGG
ATTACAGGCACATGCCACCACACCTGGCTAATTTTTGTATTTTTAGTAGAGACAGGGTCTTGGTATGTTG
CCCAGGCTGGTCTTGAACTCCTGGCCTCAAGTAATCTGCCCGCCTCCGCCTCCCAAAGTGCTGGGATTAC
AGGTGTGAGCCACTGTGCCCGGCCTTTGCTTTACTTTTAAAATAAAGATAACTTTATCATTCTTTTTAGT
TAAAAAATTAAAAAGATTGCATTATTGAAATCTTTTTTTTCAGAAGGTACAGAAAAGAATAAAGAAGAAA
ATGTACAATCCCCAATTATGCCACCACCCAGACATGTTGCTTTTAGAATTGGAATTTTTTTTTTTAGGAT
TTAGAAAACAAACTGTTCTTTTTTCTAAGGAAACCAAACTAAACCAAAATATCTTTTAGTTCTTATTAAA
CATGAAGTTTGGCAACTCTACCACATTCCATTTTAGCAATAGATTCCAAGTGTGTGGTGGCTTTGCCAAG
CTAAGAATCTAATCCTTTTTGAAAAAGACAGAACCATGTCTCAGCATCTTCTTGGTTCTTGCATATTTGT
TAAGTTCAGGTCTGGGGTCGTCACCCTCAGATATCAGGAAATCTCTAAGGGTTAAAGAGCGTTCCGTCCA
CTTTGAACTCCTGATCTTCTTCCAACTTCCCCCTGACTGTCTGTGTGACTCCTGTTATGGGAAACTAACT
GCTCAGTGGAAAAAAATCCCATGTCATTTTCAGAGATCCTGACCTTCAGCAAAGTTGTTCTTCACATTTG
AGCTGAAGGATGCCCTCTACTCTGTCCCTGTTTTCTTCACATTGTAGGTCCTACCCTAGCCCCTAGACTT
TAGGTCCAATTTGACCCACATAAAGCAAAGCAGGGTTTTCACCTCCCTTGTTCTGAAGCCTATATCTCTA
TTAACATGACCCACAATTCTTTATCCATACTAGTAAAAAATTCTCTTCTTCGGTAGCGGCACCGTAAGTC
TGGGAAATTGTATTGGCTCCCATCATGTGCACTCTCTCTTCCTCACCCTCTTCCCATACCGCCTCTCTCT
TCCAGACGATGACCCCGACAGTGCAGTGGATGATCGTGACAGTGACTACCGCAGTGAAACGAGCAACAGC
ATCCCGCCGCCCTATTATACTACGTCACAACCCAACGCCTCAGTCCACCAATATTCTGTTCGCCCACCAC
CCCTGGGCTCCCGGGAGTCCTACAGTGACTCCATGCACAGTTACGAGGAGTTCTCTGAGCCACAAGCCCT
CAGGTAGGTGCTGCGGAGTGCAGCATGCATGTGGGTCCTGCTGTGTCTCCTGGAGTGGAGAGAGGGGTAC
GGGGCTGGACAGAGCTGGAGGTGGAGTTCCAGAAGGGCAGAATTCACCCATCCAGGAGGGCAGAATTCAC
ATTTTCTTGTGGGAATTAACCATTTTTTTCTTTTTTTTTTTCTTTTCTTTTTTTTTTAGACAGAGTCTTG
CTCTGTCACCCAGGCTGGAGTGCAGTGGCACCATTTCGGCTCACTGCAACCTCCACCACCCAGACTCAAG
CGATTCTCCTGCCTCAGCCTCCCCAGTAGCTGGGACTACAGGCACAGGCCGCCACACCAAGCTAATTTAT
TTTTATTTTTTGTGGAGATGGGGGTCTTGCTCCATTGCCTGGGCTAGTCTTGAACCCCTTTTTATTCCTA
TAGCATCCTCGAGGCTGGCCAGGGAAGAGGGTCTCAGGCGCTAAGATTGGAGGAGGTATCTAATCGGGAA
ATGATAAGGTTCGTTGAATGACTAAGTGAATGGTTAGAAGAGGGCTGAGTGGTGGCCCCTATGTCCCCCT
GCCTGTATTTAGACAGAGACAGATATTGCTGTTGACGTTGAGCACGATCCTGGGTTCACATAAGCAGCAC
ATAACAGAGGGCCTGACCTGGCCAGACAGTGGGGGGCATTTGCACAAGTAAGTGATGTTTCAGTGGGTAC
CAGAGGGTGGGTAGGAGTTTGCTAGATAAAGCAGACAAGGAAGAGACCACGGCAAGTGCACAGGTTTATG
GTGTTGGAGAGACAACGAGGTGGCCAGCGTGGCCGGAATGGAGGAGGCGGGGAGAAGTGGAGGGAGGTAT
GCAGGGGGAGTTTGGAGCGTATGGGCCACACAGGGCTAGCACAGATTTTATTCCAAGGCACTAGGGAGCC
ATGGTAGGATTTAGAGCAGGGGAGGGAGGTGATTGGATTTACAATTCCCTGTGGCTTCCAAGGGAAGCAG
GAACTGTGGAGACAGCATCTGGTAGAGACAGCAGAGGCTGGCCTGGGTTGGGGCCCGGGGTACGGGGAAG
TGGATGCATTTCCCATACTTTTTCCAGGTGGAGGACAGGAGACCTGCTGCGGGGCTGTGGTGATGGCGCT
GACCCTGAGTTCCCAGCACAGTCAATTGCCTGTTCCCCACAGACCGCAAATGCCACAAAAGTGGGAATTT
TTTTTTTTTTTTTTTTTTTTTTGAGACGGAATTTCGCTCTTGTTGCCCAGGCTGGAGTGCAATGGCATGA
TCCCAGCTCACTGCAACCTCCACCTCCCGGGTTCAAGTGATTCTTCTACCTCAGCCTCCCGAGTAGCTGG
GATTACAGGCATACGCCACCATGCGCAGCTAATTTTTGTATTTTTGGTAGAGACAGGGTTTCACCATGTT
GGCCAGGCTGGTCTTGAACTCCTGACCTCAGGTGATCTGCCCACCTCAGCCTCCCAAAGTGCTGGGATTA
CAGGCGTGAGCCACCGCACCTGGCCAAAAGCGGGGATTTTTGTCTTTTCTGATCATGGCTGTGTTTTCCA
GCCCCTAGAGCAGGACCTGGCACATCGTAGGTGCTCAGTCGGTGATGAGTCAATGCCTGTGTGACTGGGG
CTCAGGTGGGCAGTGACTCGGTACCCCAGTCCCTGAACCCTGTTCCATCCCCACAGCCCCACGGGTAGCA
GCCGCTATGCCTCTTCCGGGGAGCTGAGCCAGGGAAGCTCTCAGCTGAGCGAGGACTTCGACCCTGACGA
GCACAGCCTGCAGGGCTCCGACATGGAGGATGAGCGGGACCGGGACTCCTACCACTCCTGCCACAGCTCG
GTCAGCTACCACAAAGACTCGCCTCGCTGGGACCAGGATGAGGAAGAGCTGGAGGAGGACCTGGAGGACT
TCCTGGAGGAGGAGGAGCTGCCTGAAGATGAGGAGGAGCTGGAGGAGGAGGAGGAGGAGGTGCCTGACGA
TTTGGGCAGCTATGCCCAGCGTGAAGACGTAGCTGTGGCTGAGCCCAAAGACTTCAAACGCATCAGCCTC
CCGCCAGCTGCCCCAGGGAAGGAGGACAAGGCCCCAGTGGCACCCACCGAGGCCCCCGACATGGCCAAGG
TGGCCCCCAAGCCAGCCACGCCCGACAAGGTGCCTGCAGCTGAGCAGATCCCTGAGGCTGAGCCACCCAA
GGACGAGGAGAGGTAACAGGACGGGGCCAAGGGGCCAGAGGGGCTGCCACAAGGTCACAGGGTCAGCAGG
GCTATGATGGGGTCAGCGTGGACCTGGGAAGTTGCTGGGGCTGAAGTTGTCACAGGCTCTTGGGTTTCTT
AAAGGGATCAGAGGTGACAGGGCAGAGTAGGGAGGTCAAAGAGGGTTCAAGGGGCCGTGAAGGAGACTTA
GAGTTTGTGATCTTAGTGGTTGCTGGGGTCGGAGAGGTCAAGATCCTGGGCAAATGGGGGGCCAGAGGGG
CTGGGCTGGTGAAAAGGAAGCCGAGGAACAGTGAAGTGTCACAGAAGCATTGGGTGTGTGGGAAGGGGTG
AGGGGCACTGAGGTGGGCCAGGGGACTCACGTGGGTCCTAATGTCTCTGAGGGGTCAGAGATACCATGGG
GAGCTATGCATCACTTGCACAGCTGGAGGGTCAAGGGAAGTTCAGGGGTCACGGAGAGCCAGCCCAGAGC
CTCATAGCGTTCCCTGCCTCAGTTTCAGGCCGAGAGAGGATGAGGAAGGCCAGGAGGGGCAGGACTCCAT
GTCCAGGGCCAAGGCCAACTGGCTGCGTGCCTTCAACAAGGTGCGGATGCAGCTGCAGGAGGTGAGTGAC
ACGCCCAGCCATGCCCCTGCCACACTTAGCCAGGCCACGCCCAATGGCAGGCCCACACATGTTTTGGCCA
CACCCACACCTATATTGGCCACGCCCAACACCCCACCCGTACCCAAGCCTAGCCTGGGCATGCCCAGTGC
AGTGCCCACACTGTGCCCATGCCCCAGCCACTCGAGCCCTTCCCTGGCCCCACCCTCATTCAGCCTGGCC
TCACCCAATGTCACCGATGCCCCACCCACTCTGACCCTTCCTTAGCCACATACACACACAGCCCAGGGTA
TCCCCATGGCCCGTCCACACCAGCCTGGCTATGCTAACTCCCAAACCATGCACCAAGTCTGGCCCCACAC
ATCCCCAGCCCAGCCTCCTTCCCAATGTCAGCCTGGGGTTTCTAGATCTAGAGGGAGGAGAGAAAACTAG
GGCTGAAACTGGGCTGAAGTCATGGTTAGGGATCAAGGTCAGGGTTAGTTCAGCCATCAAAGATCAGAGG
TCAGGGTTAGAATTGGTGTTAGGCAAAGGGGTCAGTGCTTAGGGCCAAATTGGAGGTCATTGTCAGGGTT
AGGGAAAGGTCTGGGGCCGGCTCAGTAGGGGAGTAGGAATCAAGGGAAGCAATCAGCATCAGGGGCAAGC
TGACTGTTTAGATGGGCAGCAGGGTTGAGGCCATTCGTTTATTCCTTCATTCAGCTCACCCTGGGCTGGG
GACAGCTGTGTTGCTCTTCAGAGTTACCCTCCAAACTGCAGTGGGATTGGCAGGAGGAGATTCTAAACAG
ACTCCCAAAGGTTTAGACCATCAAATATCAGAGCCACAAAATTACCAAACGAAATTTCTTAACAGTTTTA
AAATAGAAATCTATTTTTTGACTCAGCAGTACATACATATGGTTCTAAATGAGACAGGTGGAAGAGGACA
CAGTGAAAAGGCTGTTGGATAACTTCCACTAGGTCAAGAAATTAAATTGAAAAAATAGCAGCTACTATTG
GAACTATGTGATATACAAGAAAAACAAACTATGGAACTAGTAATATGACAAGAAAAAGACACATGGAAGG
CTCTCTGGGTTTCATAGGAAAAGCATAAAACTAATCCAAGGCAATCAGGAAAACTCCCTGGAGGAGATGA
CACTTAAGGAGAAGTGATGGCCGGGCGTGGTTGCTCAAGCCTGTAATCCCAGCACTTTGGGAGGCCGAGG
TGGGTGGATCACGAGGTCAGGAGATCGAGACCATCCTGGCTAACATGGTGAAACCCCGTCTCTAGTGAAA
GTACAAAAAAATTAGCCGGCTGTGGTTGCAGGCGCCTGTAGTCCCAGCTACTCGGGAGGCTGAGGCAGGA
GAATGGCGTGAACCCGGGAAGCGGAGCTGGCAGTGAGCCGAGATCGCGCCACTGCACACCAGCCTGGGTG
ACAGAGCGAGACTCCATTTCAAAAAAAAAAAAAAAAAAAAAAAGAGAAGTGATATCCAAAATATTTATTT
CAACAATATTTCAGGAGCTCATGCCTGTAATCCCAGCAATTTGGGAGGTCGAGGCGGGAGGCTCACTTGC
ACTCAGGAGTTTGAGACCAGCCTGGGCAACGTAGTGAGACCTCATCTCTAAAAGAAAAAAATAAAAAATA
TTTCAGAGCCGGATGCAGTGGCTCACGCCTGTAATCCCAGCACTTTGGGAGGCAGAGGTGGGTGGATCAC
CTGAGGTCAGGAGTTCGAGACCAGCCTGGCCAACATAGTGAAACCCCACCTCTACTAAAAATACAAAAAA
TTAATTGGGTGTGGTGGTGGGCACCTGTAATCCCAGCTACTAGGAAGGCTGAGGCAGGAGAATCGCTTGA
ACCCAGGAGGTGGAGGTTGCAGTGAGCTGAGATTGCGCCACTGCACTCCAGCCTGGGCAACAAAAGGGAA
ACTCCGTCTCAAACAAACAAACAAACAAAATATATATATATATATTTATTTCAGGAGCTGAGTGTGGTGG
CTTGTGTGTGTGGTCCCAGCTACTCAGGAGGCTGAAGCAGGAAGATCACATGAGGCCAGGAGTTCAAGAC
CAGTCTGGGCAATATAGCAAGACCCTGTCTTTAAAAAAAAACCAAACACCCCCTCAATATTTCAGAACAG
AAGAGTGCTGCCTGTGTTCCTCATAGGGCCACCCCTCCCCCCATGTTAACCCTTTAGTTACAAGATGGAG
GGAAGGTAGGGGCTGTGGACCCCACGTCTATGCTGAGACCCGAATGATAAATAGAGGCTGGTTGGCTGCA
GAAGGTGGGAAGAGGTACAAGCTGAAGTCACAACTCCTGGAAAGAGCCCGAGGCAAGAGAGCAGATGAAC
AAGTGAGACTATAGGGGGTTTAGGGAATAATCAATGAAGAGACTGAGGTCCATTGAGGTGGTTGAAAGAG
AAGAGCTTCTTTCTCCCCCAGCCCATCTTACAGATGGACAAACTAAGGCCCAGAGATAGCCACGGAGCTT
CCTAAAATCACTCAGCCAGGACTAGGACCCAGGCCATCTGACTCCCAGCCCAGAGGGGAGTCAGAAGTGG
GTGTGGAGCCTGCTCTGGGGAGGGGAGGGACAGCCACACTGACCATATCTGTCTGTCTGTCCTGCAGGCC
CGGGGAGAAGGAGAGATGTCTAAATCCCTATGGTTCAAAGGCGGGTAAGTAATGAAACTGTGAGCGGTGG
GAGGAAGATTTGAACCCCAAGTCCAAGGCTGGTTTGCGCCTGAGCCTCAGCCCAGAGAGGAGGAGGAGGG
GTTCCATTTAGACAGGGGACAGATTGAGCTTGGGCAAAATACGTCACTTTCATAAGGCACACAGCCATAC
GCAGACACAAAAGACAGTAATCTTTGAAGACAGGGCGGGGTGCGGTGGCTCATGCCTGTAATCCTAGCAC
TTTGGGAGGCCGAGGCGGGAGGATCATTTGAGGTCAGGAGTTCGAAACCAGCCTGGCCAACATGGTGAAA
CCCTGTCTCTACTAAAAACACAAAAATTAGCTGGGCATGCTGGCAGGCGCCTGTAATCCCAGCTACTTGG
GATGCTGAGGCAAGATAATTACTTGAACCCGAGAGGCAGAGGTTGTAGTGAGCTGAGATTGCACCACTGC
ACTCCAGCCTGGGAGACAGAGCGGGACACTGTCTCAAAAATAAACAAACAAATAAATAAATAAATAAATG
TAAGATAAAGCAGACACTATGAGGAACTAGACACTATTGGGAAATGTACACTATATATTTGTAATCCTGG
AGCAAAATTTTTGCGTTGATTCTATTTTTAAATCTCTTTGATTATTGCTACAGTTGTGGGCTCTTTAATT
AAAGATAGTTGTTTAGTCTTCAGTGGAGAATGTGGTCATGTCTAACCTCTTATGTTATGGATTTTCAGGT
TAGAGGATGCACAAGATATTTTAAAAATATGCTCAGGTTTTAAAATAGCAGCACGATAGTGACCTTCCTT
GTACGTCCTTGGCAAACAGGCAGGGAGACAGCAGCTGGGACTCCTAAATAAATGAGCAGGTACCCTAGCT
AGAGAGCCTTGGATGCGGGTCCTGAAATGCGGATTCCTGTGCACGTGATTTATGAAGGATGTGCTCTCGG
GAGAAACCTGTCAGACAAGGGGAGGCTGCCGAGAAAAGATGTGGTTTAGGAGTCTCTAAGCCTCAGTTGG
CTCCTGCAGAAAGCTTTGTAGGTTGAATAGCCCTGCAGGGCTTGTCTGGAGTCATTGGCTGCAGGCACCT
ATCTCACTGGCCAGTGAAAACCTTTTCGGGGCCAGGCTTGGTGGCTCACGCCTGTAATCCCAACACTTTG
GGAGGCTGAAGCAGGTGGATCGCCTGACGTCAGGAGTTCAAGACCAGCCTGGCCAACATGGCAAAATCCC
GTCTCTACTAAAATATACAAAAAATTAGCCAGGTGTGGTGGTGCATGCTTGTAATCCCAGCTATTTGGGA
GGCTGAGGCAGGAGAATCACTTGAGGCTAGGAGTTCAAGACCAGCCTGGGCAACATAGCGAGACCCCCAT
CTCTACAAAAGAATTTTTTTTTAATTAGCTATGTGTGGGCCGGGTGCAGTGGCTCATGCCTGTAATCCCA
GCACTTTGGGAGGCCTAGGCGGTTGATCACCTGAGGTCAGGAGTCTGAGACCAGCCTGGTCAACATGGTG
AAACCCCATATCTACGAAAAATACAGAAAATTAGCCAGGTGTCGTGGTGCGCACCTGTAATCCCAGCTAC
TTGGGAGGCTGAGATAGGAGAATTGCTTGAACCCAGGAGGCAGAGGTTGCAGTGAGCCAAGATCATACCA
TTGCATTCCAGCCTGGGCGACAGAGCGAGACTCCATCTCAAAAAAAAAAAAAAAAAAAAAATTTGCTGGG
TGTGGCGGTGTACACCTATGGTCCCAGCTACTCAGGAGGCTAAGGTGGGAGGATTGCTGTAGCCCAGGAG
GTGGAGGCTACAGTGAGCCGTGATTGTGCCACTGCACTCCAGCCTGGGTGACAGAGTGAGATCTTGTTTC
GAAAGATGGCTGGGCATGGTGGCTCACGCCTGTAATCTCAGCACTTTGGGAGGCCAAGGTGGGCGGATCG
CCTGAGGTCAGGAGTTCGAGACCAGCCTGGCCAACATGGTGAAAGCTTGTTTCTACTAAAAATACAAAAA
TTAGCCAGGCGTTGTGGTGGGCACCTGTAATCCCAGCTACTTGGGGAGCTGAGGCAGGAGAATTGCTTAA
ACCTGGGAGGCAGAGGTTGCAATGAGCCAAGAAAGGTTTCATCTATATTTTATTTTATTTTTGATACAGA
GTCTCGCTCTGTCACCCAGGCTGGATTGCAGTGGCGTGATCTCGACTCACTGCAACCTCTGCCTCCTGGT
TCAAGCAATTATCCTGCTTCAACCTCCTGAGTAGCTGGGACTACAGGCATGCACTACCATGCCTGGCTAA
TTTTTGTATTTTTAGTAGAGACGGGGTTTCACCATGTTGGTCAGGCTGGTCTCGAACTCCTAACCTCAGG
TGATCCGCCCGCCTCGGCCTCCCAAAGTGTTGGGATTATTACAGGCGTAAGCCACCACTCCTGGCCTCAT
TTATATTTTAGTATATTATTTAGATTTGCCTTAATTCACGTTTTCATTCAAGGTGGGCAATTACATCATC
TCCCCATTTTTCAGATGAGGAGGGTGAGGCCGGGTGTCTCCATTTCTTAGGACTGCTGTCACAAAGTACC
ACAGACGGGTAGCTTAAAACCACAGCAATGTATTCTCTCACAGTTCTGGAGGCCAGAAGTCTGAAATCAA
GGCATTGGTAGAGCCATGCTCCCTCTGAAATCTGTAGAAGAGAATTCCTCCCCTGCCTCTTCTAGCTTCT
AGTTTGCTTGAATTCCTTGGCCCCCGAGTATTGGTTTGTAGATACGTCGCTTTCTGCCTCTGCTGTCACA
GAGCCACCTTCTCCCCATGTATCTCTTCTTCTAAGGACACCAGTCATATTAGATTAAGTGTCTACCCTAC
TCCAGTATGACCTTATCTTAACTAATTACATCTGTGACAACCCCGTTTCCAAGTAAGGTCACCTTCTGAG
GTAGTGGGGGTTAGGGCATCAGCGTATCTTTTTTTTGAGGGACCCAATTCAACCCCTTAACACCTGGGGG
AGGTTGAATGTTCTCCCCAGGGCTCTATGTGAGGAATAGGGACATCTGGGCCCTCAGTGTCCCTCTGTGT
CTTTCAGCCCAGGGGGCGGTCTCATCATCATCGACAGCATGCCAGACATCCGCAAGAGGAAACCTATCCC
ACTCGTGAGCGACTTGGTAAGCACCCTCGCCCTTTACTCCCTGAGCAGAGCAGGCCTGCTATAAGCAGTG
CACAACCTGTGGAACTGCCCATGGTCAACCTGGGGTTGGGGGCCAGCTAGGCATTCTCTGAGACTAATGT
AGTCTGATTTCTACCCCCATGTGCTGCGTGGACACTTCAGGCCATGGTGAGTGATGGCGACATGGGCCTC
TTGGGATCTTCTCCCCAAACTCCCCCACTGGGATCTTCTAACAGGCCCCCAATTCATGGATTATGGGGGA
ACCTTGCCATGTCCCACTGTGTTGGATGCTGTGAGTCAGGGGTGCGGGGCTGCTCACTTTCCAGGGTCCC
TTCTAACTCAAAGCCTCTGTCACCTCCTAATTCTTTGTTGGGTCTGGCCCGGATGCTGTCGGTGACCTGT
TTCCAACTTGCGGTTGTGGCTCCAAAATGTGGCTGCTGGCCCCATCCGTGGCTGTGAACTCTCCTGGTGG
TGATCTCATGGATGTCAACCCCCCCGACTCCCTCTTCTGTGACCTCCCCAGTCCCTGGTCCAGTCCAGGA
AAGCGGGCATCACCTCGGCCTTGGCCTCCAGCACGTTGAACAACGAGGAGCTGGTGCGTGGGGCACCTCT
TTTTCCCCGGGTCAGGGATGGACTGGGCTAGGAGCTTCTGGAATTGTCCAAGCCTCTGTGGGTCCCCGGG
AAGAGGAAGGGTGTGTGTGTGACACAGACTGGCAGAAGGCAGCGTGGATTCCGACAGCGTGGAGGCAGGG
GAGGGCCTGGGACTTTACCGCGCTCAGTGATGGGGCGGAATGGGGCAGGACAGGGACAGCGCCAGGTTAG
GCGCCCCCAAACCGCACCCCATCCCTCCCTGCAGAAAAACCACGTTTACAAGAAGACCCTGCAAGCCTTA
ATCTACCCCATCTCGTGCACGACGCCACACAACTTCGAAGTGTGGACGGCCACCACGCCCACCTACTGCT
ACGAGTGCGAGGGGCTGCTGTGGGGCATCGCGAGGCAGGGCATGCGCTGCACCGAGTGCGGTGTCAAGTG
CCACGAGAAGTGCCAGGACCTGCTCAACGCCGACTGCCTGCAGCGTGAGCGCAGGGCCTGAGCGCAGGGC
CACGGGTTGGCGTGGGGAGCCCCGGGGCTTGCATGGCGGGGAAAGGCTGAAGGGCAAGGCGATGGGTGGG
GCACCATGGGGCGGGGCAAGGGGCGGGGCGTCGTGAGGCAGGGGAGGGACTCGCTGAAAGGGAGGGGTGG
GGTTAAAGGCGCAGGACTCCCTGGTGGAAGGGCTAGGGGGTCGAGGGGTGGGGAAAGAAGCTGTGAGGGT
GTCAGAGAGGGGTGGGGCAGGGCTCAGGGACTAGCTAGGTTGTGCAAAGGACAGGCTTAGTGAGAAGAGG
CAGCTCCCCTGGATAAAATGGGTTAGCTAGGGGTAGCTCTGAGAGGAAGAGGGGCTCAGAGAGGGAAGGG
GTTCAGACTGCGAGAGGACTGTGGAGGGGGGGATTGGAAGGGGGAGGGGACTCAGAGGAGGTGGGACCAA
GAGAAAGGGAGGGGTCTGAGAGATGGAAGGGGCTCAGGAATGTGGAGGGGACTCGCAGGGGTGGAGATCA
GAGACGAGGAGGGGATTCAGAGGAGTGGGGCTCAGAGAGGCAGCGGGACTCAGAGGGGTGGGACTCAGAG
AGGGGGCGGAGATTCAGAGGGGTGGGACGCAGAGGGGGCGGGGACTCAGAGGGGTGGGGCTTAGGGAAGA
GGCCTTAGAGGGGTGGGGCTCCAAAAACCAGTGGGGACTCCAAGGGGTGCGGGGCAGAGAAGGGCAGGAC
GCAGGGACATGGCGACTCAGAGGAGCATGGCTCCGAGAGGAGGTGGAAGGGTGAAGGGTCTGGGTGGGGG
GTACAGAAAGCAGGTAGGAAACCGGCTTCAGGGGGTGACACCTGAGTCCCCCCGGTTGATGAGTAGGGGC
GGGGCTCTCGCCTTGGTGAGGGGCCACTATGCAGGGCGCGCTGGGGTCAGCGCCGGCCTCGGGCGTCCTC
AGGGGCTGCGGAGAAGAGCTCCAAGCACGGGGCGGAGGACCGGACACAGAACATCATCATGGTGCTCAAG
GACCGCATGAAGATCCGGGAGCGCAACAAGCCCGAGATCTTCGAGCTCATCCAGGAGATCTTCGCGGTGA
CCAAGACGGCGCACACGCAGCAGATGAAGGCGGTCAAGCAGAGCGTGCTGGACGGCACGTCCAAGTGGTC
CGCCAAGATCAGCATCACCGGTGAGGGGGCGTGGGCCGCCATAGGGCCCCTCCTTCTCCACCCTCTGAGA
CCTGTCTCATGCCCTGTCCCATGGCCTGGTCCCTCTCCTTTGCAGCGCGCACTCACTCGGTCGGGTGCAT
TCCATCTCATCTCCGTGTGTGCACGCATATGGGGGGACATGCGTGCCTCCAAACGCCTGTTCATGGCACT
GTATCTGGGTGCGTCTTGGATGGTGCCCTCCAGAATGAGACTCCAAGAAGAGGAATTGAGGGTGCATGGT
TTATCTGGAAAGTGACCCCAGAAAGTCCTGGTGAGGGGCAAGGACTTGAGACAGGGATGGAAGGAGTCCT
GAAGGAGATGCCGTTGAGCAGACAATGCTGTGGGCAAGGGGGTCAGCCCATCCTGGGGCCACTGGGGACA
ATGTCGAGCATGCAGCTCAGTGTGGCCCCACTTAGGGGCGAGGATACTGGCTTTTCTCCACACCCAGCCT
CATGTGGGTTTCCCCATAAACAGACCTGAGGATGAGGATTTCAGGTTATGTGGGTTATCCAGGAAGTGAC
CCCAGGACGGAGCTGGGGTGGTAAGTCAGGGAGGGAAGGAACCCTGCAGGGGGCACCAACGAGCAGGAGA
TCTCGGGGGGCAATGGGTTCTTGTAAGTGTCTGACCTCAGGGAGTTCACACCTGAGAGAGGTCCTACCCA
TGCGCAAGGCAGCTGGGGCACCTTCCCATCCTTCATGGTTTGGGGACTCCTTCCCAGCACTTTGGGAGGC
TGAGGCTGAGGCAGGCGGATCACCTGAGGTCAGGAATTCGAGACCGACCTGGCCAACATGGTGAAACCCC
ATCTCTACTAAAAATGCAAAACGATTGGCCGGATGGGGTGGCACGTGCGGGTAATCCCAGCTACTTGGGA
GGCTGAGGCAGGAGAATTGCTTGAACCCGGGAGGCGGAGGTTGCACTCCAGCCTGGGTGACGAGCAAAAC
TCTGTCTCAAAAACAAACAAACAAACAAACAAACACACAAAAAACCTCTCTGGCAAGCCCAGCGTGCCCT
GCCATTGCTCTCCAGCCATGCTGCAGGTGTCCCAATTATCAGCCTGCAGCGTGTGGCAGTGACTGTCCCC
AGCATGCCTCGCTTCTTGAGTGCACACCTGTGTATGCCCTCTGTGTCTTCCAGTGGTCTGCGCCCAGGGC
TTGCAGGCAAAGGACAAGACAGGATCCAGTGACCCCTATGTCACCGTCCAGGTCGGGAAGACCAAGAAAC
GGACAAAAACCATCTATGGGAACCTCAACCCGGTGTGGGAGGAGAATTTCCACTTGTAAGTGCCTGGCTG
GGTCCCTGGCCCCATGTGGGGCATCCTGCTGGGGCAGCCAAAAGAGGGCTCCAAGGACAGGACTCACACT
GGCTGCCTGACCCCTGCCTCTGCCTCCTCCTCCCGCCACAGTGAATGTCACAATTCCTCCGACCGCATCA
AGGTGCGCGTCTGGGACGAGGATGACGACATCAAATCCCGCGTGAAACAGAGGTTCAAGAGGGAATCTGA
CGATTTCCTGGGGCAGACGATCATTGAGGTGCGGACGCTCAGCGGCGAGATGGACGTGTGGTACAACCTG
GGTGAGAGAAGCTGGGTTCTGAAGCGGGTGGGGACGGGTCCCAGGGATCCAGCCAGAGCATGGAGCCCAC
GAAGAGCAGAGAGATGTGTTCTCAGGAGGAGTTTGGTCGAGGAGCATAATCTGATGGGGGAGGCAGGGTC
TAGGAGCCCAGTTTGATGGGAGCAGGAAGCACCCAGGCCAGGAGGGTGAGCAGAGCCCAGGAACCTCTTA
GTTCAGCTTAGGAGGGAGGGTGGGGACAGAATCTCCATGTTCTAGTCTAATGGGGGAGGCAAGAAGCAAG
AACTGGGAATCCTAGTCTGAGGGGAGAGACAGAGACCTAGGAACTAAATCTAAGAAAGAAGATTGAGCTT
TAAGAATCCAGGCTGGGGCCAGGTATGGTGGCTCACGCCTGTAATCCCAGCACTTTGGGAAGCTGAGGCA
GGCAGATCACATGAGGTCAGGAGTTCGAGACCAGCCTGGCTAACATGGTGAAACCCCGTCTCCACTAAAA
ATACAAAAATTAGCCAGGCGTGGTGGTGGGTGCCTGTAGTCCCAGCTACTTGGGAGGCTGAGGCAGGAGA
ATCGCTTGAACCCAGGAAGCGGAGGTTGCAGTGAGCTGAGACTGCGCCACTGCACTCCAGCCTAGGCAAC
GAGAGCAAAACTCCCACTCAAAAAAAAAAAAAAAAGAATCCAGGCTGGGGGCGCCGGGCAGTGGCTCACA
TCTGTAATTAATCCTATCACTATGGGAGGCTGAGGCAGGCCAATCACTTGAGTCCAGGAGTTCAAGACCA
GCCTGGGCAACATAGTGAAACCCCATCTCTATAAAAGATACAAAAATTAGCTAGGCAGGGTGACACTCAC
CTGTGGTCCCACCTACTCTGGAGGCTAAGGTGGGAGGATCCCCTGAGCCTGAGAGGTAAAGGCTGCAGTG
AGCTGTGATCACACTGCTGCACTCCAGCCCAGGGAACAGAGTGAGACCCTTTCTCAAAAAACAAATATGG
CCGGGTGCAGTGTCTCACGCCTATAATCCCAACAGTTTGGGACGGCTGAGGCAGGCAGATCACTTGAGGT
CAGGAGTTTGAGACCAGATTGTCCAACATGGCGAGATCAAGCCCCTGCACTCCAGCCTGGGCAACAAAGG
AAGACTCCGTCTCAAAAAAAAAAAAAAAAAACAAAAGAAAAAGAAAAAAAAAATGGAATCCAGGCTGGGC
ATGGTGGCTCCCACCTGTTATCCCAACATATTGGTTGGGTGGCTGAGCTGGGAGGGTCACTTGAGCCCAG
GAGTTCGAGACCAGCCTGGGCAACATAACAAGGCCTTTGTCTCCATTAAAAAAAAAAAAATAGCTGGGTG
TGGTGATGCGTGCCTGTAGTCCCAGCCACTTGGGAGGCTGAGGTGGAAGCATCATTTGTACCTGGGAGGT
TGAAGCTGCAGTGAGCTATGATCATGCCACTGCACTCCAGCCTGGGCGATAGAGCAAGACTCTGTGTCCC
CCCGACCCCCCACCACAAGAAAAGAATCCAGTCTAAAGAGGGAGGTATTGTTTGGGAATCCTAATCTGAG
ATGGCTGCTACAGATCAAAGAACCCTGTGTAAGGAAGTTGAGTAGAATCTGGGGAGTCCAATCTAATGGA
GGAAGCAGGGTGTATGAGCCTAATCTGAGGGGGTAGAAAGGACCCAGCCTGAGAGAGGTGAGCAGAGCCC
GGAAACCTCTTAGATTGGAGGACATCTAGATATCCCATTCTGATGGGGGAGGTGGGAGACAAGACCAGGG
GGTCCTAGTCTGAGGAGAGAGGCACAGACCCAGGAACAGTGTCTAAGATGTGTAGTCTCCGGGGAGCATG
ATCTGATGGGGGAGGCAGGGCCTGGGAGCTCAGACTGGGAAAGAAGTGGGGCCTAGGGCTGCTAGTCTAA
GGAGGGAGGCACATAGCCAGGAACTTAATCTGAGTGAAGAAGCAAGGTCTGGGATCCTTGTTTGAAGGAA
GAGACAGGGCTTAAGGAATTCTAGCCTAAACAGGGAGACTCAAGCCTAGGGAGCCAATCAGAAGAGAGAC
ACCAAAGCCTTAGTTTCCGGAAGTCTGGGAGGACTACAGAATCGTGTATCTATTAAAAATTGCCTTGGGA
GGCCGAGGCGGGCGGATCACCTGAGGTCAGGAGTTCGAGACCAGCCTGGCCAACATGGTGAAACCTCGTC
TCTACTAAAAATAAAAAATTAGGTGGGTGTGATGGCACATGCCTGTAATCCCAGCTACTCGGGAGGCTGA
GGCAAGACAATTGCTTGAACTCAGGAGGTGGAGATTGCAGTGAGCCAAGATTGCGCCACCGCACTCTAAC
CTGGACCACAGATCTCAAAAAAAAATAAAATAAAAAAAAATTTGCCCATGGCTGGCCGGGCGCGGTGACT
CACGCCTGTAATTCCAGCACTTTGGGAGGCTGAGGTAGGTGGATCACCTGAGGTAAGGAGTTCGAGACCA
GCCTGGCCAACATGGTGAAACCCCGTCTCTACTAAAAGTATAAAAATTAGCTGGGCACGGTGGCAGGCAC
CTGTAATTCCAGCTAGTTGGGAGGCTGAGACAGGAGAATCGCTTGAACCCAGGAGGTGGAGGTTGCAGTG
AGCTGAGATCGTGCCACTGCACTCCAGCCTGGGTGACAAGAGCAAGACTCCCTCTTAAAAAAAAAAAAAT
TGCCCACTGCTATAGTGGGAAGTTCTGACACTGTCTTCTTTTTCTGCCCTGCAGACAAGCGAACTGACAA
ATCTGCCGTGTCGGGTGCCATCCGGCTCCACATCAGTGTGGAGATCAAAGGCGAGGAGAAGGTGGCCCCG
TACCATGTCCAGTACACCTGTCTGCATGAGGTGAGGGTCATTGCTCGGCCCCTCCCATGCCACTTCCACT
CACCATTCCTGCCTGCCCAGCTCTTCCTCTTTCTGGCCACACCATCCACACTCTCCTGGCCCTCTGAGAC
TGCCCGCCATGCCATTCCCTTTACCTGGAAAACTCCTCCCTATCCATCAAAGTCCAGATTCAGGGTCACC
TCCTCTGGGAAGCCCACCTTGGCCTCCAGGTTGACTCTCACTACTCATCATCAGGTTCTTCCTTCTATTC
CAGCCCTAACCACTCAGGATTGGGCCGTTTGTGTCTGGGTATGTCTCTTCCAGCTGCCTGGGTTTCCTGG
AAAGAACTCTTATCCCCAGGAACTAGTTTGTTGAATAAATGCTGGTGAATGAATGAATGATTGAACAGAT
GAATGAGTGATGAGTAGATAAAAGGATGGATGGAGAGATGGGTGAGTACATGGATGGATAGATGGATGAG
TTGGTGGGTAGATTCGTGGCTAGATGGATGATGGATGGATGGACAGATGGATGGATATATGATTGAACTA
TTGAAAGTATAGATGTATGGATGGGTGAATTTGGGGGTAATTGTTAGATGATGGATGAGTATAGATGAAT
GATGGATGGATAACTTGATGAGTGGATAGATAGATTGCTGGATAGATGATTGACTGGGTGGATAGATGAA
ATGTTGGATGAGCAGATTAAGTTGTATTGGATGGGATGGATGGAAGTGTGGTTGAGTTATTAGAAGGAAG
ATTGAGTAGATAGGTGAATTTGTTGATAGTCAGATGGGTAGATAGGTAGATGGATGGATGGATGGATGGA
TGTATAGGCAGATGGACAAATGGATGAATGGGTGGGTGGATGAATGGAAGGATGTGTGGTTGAACTATTG
CAAGTATTGATAATTGGGTTCATAATTTCTGAATATTTAGATGGATGGTTGTGAGTGGCTGGTGGACAGA
CGAAAAATGGATGGTTGGATAAATTGATGGGTGGATGGATGGTTGGTTGTATGAAAGAATGAATGATTGG
GTAGGTGGATTAAGTTGCGGATCAATGTATGGGATGGATGAATGGATGGATGGATGGATGTGTGGTTGAA
TTACTGAAAGGTTGGAAGAGTGGATGGGTGAAATTTGGGGTAGTTAGATGGGTGGGTGTGTGGATGGATA
AAAGAGTAGATGAATGAATTAATGAATAAACAGGCAGATGGATGATGTAAGCTGCCCCAGACCCTGGGAC
CTCTGACCCCCGGCGACCCCTTGCACTCTCCATGACACTTTCTCTCCCATGGTGGCAGAACCTGTTCCAC
TTCGTGACCGACGTGCAGAACAATGGGGTCGTGAAGATCCCAGATGCCAAGGGTGACGATGCCTGGAAGG
TTTACTACGATGAGACAGCCCAGGAGATTGTGGACGAGTTTGCCATGCGCTACGGCGTCGAGTCCATCTA
CCAAGCCATGACGTGAGACTGCAGGCTGGGGTGCAGGAAACAAGAGGGAGGTCACCAAGTGGGCACTGGC
AGGTCTGGGGTGGGAGGGATTCTCAGGGGGAAGACCCAGAGAGGAAGTGGGCGTGGTGGTGGTGGGTTCC
GTAATTCCCCTGGAGATCAGGAGAGCGCTGTGATTGACACCTGGAGTGACATGGAAGAGAGGGAAGACTT
AGAAGCAGAGATAGAGGCTGGGCACAGTGGCTCAAGCCTGTAATCCCAGCATTTTAGGAGGCTGAGGTGG
GCGGATCACTCCAGGTCCAGGAGTACAAGACCAGCCTGGCCAACATGGTGAAACCCCATCTCTACTAAAA
ATACAAAAGTTATCCAGGTGTGGTGGCTTGGGCCTGTAATCCCAGCTACTCGGGAAGTTAGGGTGGGAGA
ATTGCTTGAACCTGGGGGGCAGGGGTTGCAGTGAGCCGAGATTGCGCCACTAAACTCCAGCCTGGGTGAC
AGAGTGAGACTCCATCTCAAAAAAAAAAAAAAAAGAAAGAAAGAAAAAAAGAAGCAGAATTAGAGCAACT
CAAATGGATATAAAGATGGAGGGGAGAGGAGATGCGGAGACCCAAAGGACAGAATCAGGCAGGGGATGGT
TTAGGAGGTGACAGAGACCCACTCACAGATGCTATCTTGGAGGCATTCTAGGGGGGATCTTGGTCCATCC
TGGCTGGACCCCTGGCCTAGTGCCTCCTGCTCCCTCTCTCCAGCCACTTTGCCTGCCTCTCCTCCAAGTA
TATGTGCCCAGGGGTGCCTGCCGTCATGAGCACCCTGCTCGCCAACATCAATGCCTACTACGCACACACC
ACCGCCTCCACCAACGTGTCTGCCTCCGACCGCTTCGCCGCCTCCAACTTTGGGGTCAGTCCTGGGGACT
GGGATTGGAGAATTAGGGAGAGCCCAACTTTATGCCGGTCAGATCTGATGTGACTTCTGGGTCCCCAGTC
TAGACCTGATTGCTGTGTGACTTTCCACCAGTCACTTCCCGTCTCTGAGCCTCCATTTATTCCTCTGTAG
AATGCTATAGAATGGAGGTCGGGCGCAGTGGCTCATGCCTGTAATCCCAGCACTTTGGGAGGCCGAGGCT
GGAGAATCACTTGAGGCCAGGAGTTCGAGACCAGCCTGGCCAACACGGTGAAAACCCGTCTCTTCTAAAA
ATCCAAAAGAAAATTAGCTGGGTGTGGTGGCCTGTGCCTGTAGTCCCAGCCACTTGGGAGGCTGAGGCAG
GAGAATTGCTTGAGCCTAGGAGTCGGAGGTTGCAGTGAGCTGAGACTGCGCCACTACACTCCAGCCTGGG
CAACAGAGCAAGACTCTGTCTCAAAACAAAAAAAAAAATGCCATAGAATGGAAATGGACATTATGAGGGT
GGTGGATGAGGTATACTTACTGTACAGTAGGCGCTCAGCCACTATGGCGGCCATGTCCTGCCTCCATCCA
TCCTCCCTCCTCCCCTTCCTCCTCAGAAAGAGCGCTTCGTGAAACTCCTGGACCAGCTGCATAACTCCCT
GCGGATTGACCTCTCCATGTACCGGGTAGGAAGTGTGTGCATGAGAATTTGCTCACCCCACGCACATGTG
TGTGCCTGGAGGGGAAAGCTACCAGCAGGTGTGTGCATGGGAGGACCCATCTTCGCATGTACGATGTGTT
CCTCCAGCATGTGTGCACCTGCATGGGCACTACCTGCCGTAATGTGCTTGGTGCATCCAAGCAGATCCCC
AGTTGCTTCGAGGTGCTCTAATCAACCCCCAGCCTGAAACCGGGGAGCCTTTGTATCCCCCTGAAAAGCA
GTCTCCCATCCTCCCCACGCCTTCTTCCATAACCCCACATCTCTTCCTGCTCCCAACAGAATAACTTCCC
AGCCAGCAGCCCGGAGAGACTCCAGGACCTCAAATCCACTGTGGACCTTCTCACCAGCATCACCTTCTTT
CGGATGAAGGTAGGAAAGGATCCAGTTGCCTTTGCTCTCCAAGGAGGGTTCTCTAGGATCCCCAGCTCCC
AGGACAAGTGACATTCCTCCTGGAGAGTGGCAGCCTTTCTCAGTAACCTTTTCCTTTCATACCACTTCAT
TTCCTTAAACCCAAAATGACTCGCAGTCACTTCCTGGGGACCTCCTGTCACAGCTGTGGCCGCCTATGCC
TCTCTCCCTCCCTTCAGGTACAAGAACTCCAGAGCCCGCCCCGAGCCAGCCAGGTGGTAAAGGACTGTGT
GAAAGCCTGCCTTAATTCTACCTACGAGTACATCTTCAATAACTGCCATGAACTGTACAGCCGGGAGTAC
CAGACAGACCCGGTGAGACTCCAGATGGGTCAGAAGGGAACAGTGATGCCAACTAGACACAGGCTTCAGT
CCCAGCCCTGCCCCTTCCCGAGGGATTTAACTCTTCTGAACCTCAGTATCTTCTTCTATAAAATGGGGTC
ATTAACCCACATCTCAGGATTAGGGAGAAGAGTTCATGAGCTGTAAGTTTAGATAAAATATAGTCGGCAC
TCAGTACATTTGGTTGCGTAGTTGAGTTTGGCATAAAAAAAAATTTTTTTTTTTTGAGATAAAGTTTCAC
TCTTGCTTCCCAGGCTGGAGTGCAGTGGTGTGATCTCAGCTCACTGCAACCTCTGCCTCCCAGGTTTAAA
TGATTCTCCTGCCTCAGACTCCCGAGTAGCTGGGATTACAGGTGCCCACCACCACACCTAGTTAATTTTT
TGTATTTTTAGTAAAAACGGGGTTTCACCATGTTGGCCAGGCTGGTCTCGAACTCCTTGACCTCAGGTGA
TCCACCTGCCTCGGCCTCCCAAAGTACTGAGATTATAGGCGTGAGCCACCACTCCCAGCCTGGCATAAAA
ATTTATGTCTGGCATACAGTCACTGTTCAGTAAATGTTGAGTTGAATTGAATTTATTTATTTATTTTGAG
ATGGGGTCTTGCTCTGTTGCCCAGGCTGGAGTGCAGTGATGCAATCATGGCTCACTGCAGCCTCGACCTC
CCAGGCTCAAGTGATCCTCCCACCTCAGCCTCCCAAGTAGCTGGGACTATAGGCACGCACCACCATGACA
GGCTAGTTTTTGTATTTTTGTGGAGATGGCATCTCACTATGTTGCCCAGGCTGATCTCCTGGGCTCAAGC
GATCCTCCTGCCTCAGCCTCCCAAAGTGCTGGGATTACAGGCATGAGCCACCACCTGTAAGGAGCTTATA
GCCTATTATGAGGGAAAGATGTACAAACTGGAAATTTACAAACAGGGATGGTTAGTATTGAGATAGTGGG
ATCTCAGGAGGCTGTGGGAGCTGGAGGCAGCCCCTACCCAGGTTCTGATAGGATATAACACATAAGCTGT
GTTCAGTTCAATTTGATTTCATTCTGTTCCTTTACATTCAGTTGACTAGAGTTGGAATCAGTCTCACTCT
CATTTGAATTGAGTTGAGGTGAACTGGATTAAATTAGGCTATAAGGAGCTTATAGCCTATTATGAGGGAA
AGATGTACAAACTGGAAATTTACAAACAGGGATGGTTAGTATTGAGATAGTGGGATCTCAGGAGGCTGTG
GGAGCTGGAGGCAGCCCCTACCCAGGTTCTGATAGGATATAACACATAAGCTGTGTTCAGTTCAATTTGA
TTTCATTCTGTTCCTTTACATTCAGTTGACTAGAGTTGGAATCAGTCTCACTCTCATTTGAATTGAGTTG
AGGTGAACTGGATTAAATTAGATTGTTTAGTTCAACCATAATCAGTTTAGTTATATTTATTTCTATTTGG
TTGACTTAAGTTAAAATTGTTCTTGACGGCCAGGCACAGTGGCTCACGCCTGTAATCCCAGCACTTTGAG
AGGCCGAGGTGGGTGGATCATGAGGTCAGGAGATCGAGACCATCCTGGCTAACACAGTGAAACCCCGTCT
CTACTAAAAATACAAAAAAATTAGCCGGGCGTGGTGGCGGGCACCTGTAGTCCCAGATACTTGGGAGGCT
GAGGCAGGAGAATGGTGTGAACCTGGGAGGCAGAGCTTGCAGTGAGCTGAGATCGCATCACTGCACTCCG
GCCTGGGTGACAGAGCGAGACTCCGTCTCAAAAAAAAAAAAAAAATTGTTCTTGACAAATTAGTGAGCCA
GGCTGGGCTCAGTGGCTCACACCTGTAATGTCAGCACTTTAGGAGGCTGAGGCAGGAGGATCCCTTGAGG
CCAGGAGCTCGAGACCAGTTTGGGCAACATAGCGAGACCCTATCTTTGCAAAATATACAAAAATTAGCCA
GGTGTGGTGGCGCACCTGTAGTCCTGGCTACTTTGGAGGCTGAGGTGGAAGGATCACTTGAGCCCAGGAG
TTCGAGTCTATGGTGAGCCATGATTGCACCACTGCGCTCCAGCCTGGGTGACAGAATGAGACTCTGTCTC
TTGAAAGAAAAAAAAAAAAAATAGAGAGAAGAACAAGTTGGTTGATTGCATTGAGTTTTATTGAGTACAA
ATTCATTCATTTCCATTTAGTTCATTTACATTCAAGTCAAGTTGTTCTCAACTGGGTTAAATTGTCTTGA
GTTAGGATGAACTGGGTTGTTGGATTAGATGCAATTGATTTCAGTTGAATTGGGTTGAATTGGGCTAATT
TCAGCTGATTATATTCATTTCCATTGATTAACAAAGGTGGGTTGAATTGCCCTGCGTATGTTCAGTTGGG
TTTAGATAGGTAGAATCGGATTGGGTTGACTTGGGTAGAGTTGAGTTCGAGTCGATTTATTTCCATTATT
TTGATTTGGGTTGATGTTGATCTTGGACAAGTTGATTAGGTTCAATCCAACGGAATTCATTTGAGTTTAA
TTCAATCCAGTTAGGTTGAATTGCACTCCATTCAGTGTGATTGGCCCAAGTTCAGTTCCATTGATTTAAC
TCAGAGGAAGAACTTACTTCCGTTAAGCTAAGTGGGCTTAATTTGCATTCATTTCATTTCCATTTGGTTT
AGTGGAGCTGGGTTTGTTCAACTAAATTTGGTTTCATTTATTTCCATTCACTTTTAGAGTGGAGTCTAAA
AATCTTAAGCTTTATCAAGCTGCATTGACATGAGCTCTGTTTGGGCCAGTTTATGAGTTCAATTCCTCTC
TATATAGATTTCTTACCTGAACCATACACATGATGATGGGATGCATTCCTCTAAAACCTCTTGTTCTTCA
GTAATAAACTGACCGAGGCACCAACCTCTGGACCCCCTATAACCGAGGTCTCCACTGTCCATTTCAGGCC
AAGAAGGGGGAAGTTCTCCCAGAGGAACAGGGGCCCAGCATCAAGAACCTCGACTTCTGGTCCAAGCTGA
TTACCCTCATAGTGTCCATCATTGAGGAAGACAAGAATTCCTACACTCCCTGCCTCAACCAGTGAGTTGT
GTATCTGTGTAGTTAATTATCTGGGTGTCATCGTGTGTATGTATACAACTTTGTGTCTTGTGTGTCAAGA
TGATTTTGTCTAATTACACAAATGTGCACCTGGGGGTAATTGTGGGTCTGATTATACCTGTGCAAAATTC
AAATATGGGTACAATTTGCAAACATAAACATAAAATTGTGTGTATGTTCACAATCACTGGTATAATCAGA
CATGTATTTTGTATGTATTCATTTGCATGCATAACTGTGTGTACATATGTGTATAATTTTTTATGTGTAT
GTAGGTTAATTAATAATAGTGTTGCTCAAGTATTACTATGTGCTACCCTAATACATATCATACATTTAAA
TTGCATTATATCTTATATGTATGGATGTAAGTAATTTTGTATATTGTTGTGGTCAGTGGGTTTTGGGTTT
AATTTGTATATGTGTAAAATCATTGAATGCAATTCAACGTACAATATTGTACAATATACAATATTGTGTA
TTGTGTATGAATATGGGCACAGTTTTCATTTGTGGATTTATATGTCTGTAGAATTTTCATCTGTGTTAGC
TGAATGAGCTACTGTGTTCTATTTCTCTGCCAGATGAGTGCTAGAGAGGACTCTAGCTTTGGGGCGTTAA
CATATCCTGGTTAGGGAATTAAGATCAGGGATTTGGATGGATTGAAGGGTGGGTGGATGAATGGATGGAT
TAATAAACAGATGGGGTCAGGCACAGTGGCTCACGCCTGTAATCCCAGCACTTTGGGAGGCCAAGGTGGG
TGGATCATTTGAGGTCAGGAGTTTGAGACCAGCCTGGCCAACATGGTGAAACCCTATCTTTACTAAAAAT
ACAAAAATTGGCCACGCGCGGTGGCTCACCCCTGTAATCCCAGCACTTTGGGAGGCCGAGGCAGGCGGAT
CATGAGGTCAGATGGAGACCATCCTGGCTAACATGGTGAAACCTTGTCTCTACTAAAAATACAAAAATTA
GCCGGGAGTGGTGGTGGGCGCCTGTAGTCCCAGCTACTCGGGAGGCTGAGGCAGGAGAATGGCGTGAACC
CAGGAGGTGGAGCTTGCAGTGAGCCGAGATTGGCCACTGCACTCCAGCCTGGGCAACAGAGTGAGACTCC
GTCTCAAAAAAAACAGAAAAAACAAAACAAAAATTAACCGGGCGTGGTGGTACACGTCTGTAATCCCAGC
TAGTGGGAGACTGAGGCAGGAAAATTGCTTGAACCCAGGAGGCAGAGGTTGCAGTGAGTCGAGATTGCGC
CACTGCACTCCAGCCTGGGGTGACAGAGCGAGACTCCGTCTCTAAATAAATAAGTAAATAACAGATGGAC
AGATAGATTGGTAGAAGGATGACTGTGTGGATAAAGGAACGGATGGGCCAGGTGTGGCAGCTCACGCTTG
TAATCCCAGCACTTTGGGAGGCCGAGGCGGGAGGATCACCTGAGGTCAGGAGTTTGAGACCAGCCTGGCC
AACATGGCAAAACCCCATCTCTACTAAAAATATAAAAAATTAGCCGGGCATAGTGGCTCGCGCCTGTAAT
CCCAGCTACTTGGGAGGCTGAGGCACGAGAATCATTTGAGCCCGGGTGGTGGAGGTTGCAGTGAGCTGAA
ATCGCACCACTGCACTCCAGCCTGGGTGACAGAGTGAGACTCCGTCTCTAAATAAAAAAAAAGGAATGGA
TGGATGGGTGGACAGATGGATGGGTAAATGGATGGGTGGATAGCTGCATAAGTGAGTAAATAAATGGATA
GAGGGATGGATGGATAGGTGGATGGATGAATAGATAGATGGGTCATTTAATGGGTGGGTGGATAGTTGTA
TGAGTGGGCGAATGAATGGATGGAAGGACAGATAAATAGGTGGATGATGGAAGGATGGACGGATGGATGG
ATGAACAGATAGACGGGTAGGTGGCTGGATGGACAGTTGGATGAATGGGTGGAGGGATAGATGGATGAAC
AGGTAGATGAGTGGTTGAGTGGATGGATGAATAGTTGGATGAATGAGCAAATGAATGGATGGAGGGATGG
ATGGATAGATGAATAGATAGATGGATAGGTGAACGGATGGGTGGATAGTTGCATAATTAGGTGAATGAAT
GGAAAGAGGGATGGATGGATGGATGGGTGGATAGATGAATAGATAGATGGGTAGGTGGATGGATGGATAG
TTGGATGAATGGGTAGAGGGATAGATGGATGAACAGATAGATGGGTGGTTGAGTGGATGGATGAATAGTT
GGATGAATGAGTGAATGAGTGGATGGAGGGATGGATGGATAAATAGATAGATGGATAGGTGAATGAATGG
GTGGATAGTTGCATAAGTAGGTGAATGAATGGATAGAGGGATGGATGGATGGGTGGATGGATGAATAGAT
AGATGGGTAGGTGGAGGGATAGATAGTTGCATGAGTGGGTGAATGAATTGATGAAGGGATGGTTGGATGG
GTGGATAATGGGTGGATGGATGAATAGATAGATGGGTACATGGATGGGTGGACAGTTGCATGAGTGGGTG
AATGAATGGATGGAAGGATGGATGAATGGATGGAGGAATAGATAAATGAGTTGTTGAATGTATGGGTGGA
TAGTTGCATGAGTGGATGAATGAATGAATGGAGGGACAAATGGATGAGTGGGTGGAGGCTCAAAGGGAAA
CAAAGCCTTAGTGCAGAGTCAGTCAGCAGTGGCTATGAGGGAACCTGAACCCAAATCCCTCTACCCTACC
CTACACTCCTCTGTGGGGCAGGGAAGGACAAAGCAGCCCATCCCATCTGCCTTCTGCCTGCCAAAGTTTT
ATACTTCCATGACTTTGCCAGGTTTCCCCAGGAGCTGAATGTGGGTAAAATCAGCGCTGAAGTGATGTGG
AATCTGTTTGCCCAAGACATGAAGTACGCCATGGAGGGTGAGTTTCCCACCCCAGTGTTCCCCAGCCTGG
CCACACCAGGTGGCTGTACCTCTGTGTCCCCTCCAAGGCTGTGAGCACCCTATAATACCCTCATGCCTGA
GTTGGAAATCAGTGATGGCCAGAGTAGGCAGCCTCTCTGCCGAGACAGAGGGTGGCAGACCCTTCCAGCT
GTGCCATCCTCTTTGTCCCTGGCCAGAGCACGACAAGCATCGTCTATGCAAGAGTGCCGACTACATGAAC
CTCCACTTCAAGGTGAAATGGCTCTACAATGAGTATGTGACGGAACTTCCCGCCTTCAAGGACCGCGTGC
CTGAGTACCCTGCGTAAGTCCCCTGCCCCAGGCCCAACCCAAGCCAGAACTGTAGCACTGACAGCTAGAA
GGAAAGCCAGAGAGGAAGACTGACCTACTTAGGGTTACCTGGGCATCAGGGGCATGGGTGGGGCTTGAAT
CCAGTGTTCTCCACTCTCAGCCATTGAGCAGTTGACTCCTACAGCCCAGAAAATTCAGTCAACAGCAACA
GGAACCATGTGACTTTCTCATTTTATCCTTTTGACAATTCTATGAGTTAAGGTGGGATCATTTTAATTCC
TATTTTGCGGAGGAGAAATTGGAGAGTTAAAGATGCCAAATGGCCAGGCATGGTGGCACATGCCTGTAGC
CCCGGCAATCTGGGAGACTGAGGCAGGACTTGCTTGAGCCCAGGAGTTCGAGACCAGCCTGGAAAAGATA
GTCAGATCCCATCTCTAAAATTAATGAATGGGTCAGGCACAGTGGCTTGTGCCTGTAATCCCAGGACTTT
GGGAGGCCGAAGTGGGCAGATCACCTGAGGTCAGGAGTTCGAGACCAGCATAGCCAATAGGGCGAAACCC
CAGCTCTACAAAAATACAAAAATTGGCCGGGCGCAGTGGCTCATGCCTGTAATCTCAGCACTTTGGGAGG
CCAAGGTGGGTGGATCACCAGAGGTCAGGAGTTTGAGACCGGCCTGGCCAACATGGTGAGACCCTGTCTC
TACTAAAAATACAAAAATTAGCCAGGTGTGGTGGCAGATGCCTGTAATCCCAGCTACTTGGGAGGCTGAG
GCATGAGAATTGCTTGAACCCAGGAGGCGGAGGTTGCAGTGAGCCGAGATTGCACCACTGGATTCCAGCT
GGGGCAACAAAGTGAGACTCCGTCTCAAAAACAAAGAAAAAAATTATCCGGGTGTGATGGCACACACCTG
TAGTCCCAGCTACTCGGGAGGCCGAAGCAGGAGGATCGCTTGAACTCAGGAGGCAGAGGTTGCAGTAAGC
GGAAATCGTGTCACTGCACTCCAGCCTGGGCGACAGAGTGAGACTCCATTTCAAAAAATAAATAAATATA
AAAATAAAATGAATGAGTGAATAAATGCCACATTCCTTGCCCACGGTGACTCCCAGTACATGACAGACCC
GAGATTTGAACTCGGGACATCTGATTCCTGGGCTGTGTGTTGGAGGATAGTACGGTGCCGCCGGTTCCTG
AGAATTGTGGTGTCGTTCTCTGCTCCCAGCAGCACAGGAGGATGGCTAGTCTTCTGTTGTACAAGAAACG
AAAGCTCTGGCTGGATGCGGTGGCTCATTCCTGTAATCCCAACATTTTGGGAGGCCAAGGTGGGAGGATC
ACTTGAGGCCAGGAGTTCAAGGCCTGCCTGGGCAACACAGGGAAATCCTGTCTCTACAAAGAAGACAAAA
AAAAAAATTAGCCGGGCATGGTGGCATGTGCCTGTAGTGCCAGCTATTCGGGAAGCTGAGGTGGGAGGAT
TGCTTGAACCCAGCAGGTCAAGGCTGCAGTGAGCTGTGATCGCACCACTGCACTTTAGCCTGGGCAACAG
AACAAGACCCAGGAAGGAAGGAAGGAAGGAAGAAGGAAGGAAGGAAGGAAGGGAGGGAGGGAGGGAAGGA
AGGAAAGGAGGGAGGGAGGGAGGGAGGGAGAAAACAAGAGCTCAGAGAATAAACCCACTTGCCATGGGCA
GTTTATCTGAAGAAGGAAGGAAGGAAGGAAGGAAGGAAGGAGGGAGGGAGGGAGGGAAGGATGGACGGAG
GACTCAGAGAGGACTCAGAGAATAAACCCACTTGCCATGGGCAGCTTATCTGAACTAGGATTCCCACAGG
CCTGGGCCCTGTTGTAAAAGGGGCCACTCAATCTATTTCATGAGCAAAGTAACTGAGGTTCAGTGCAGGA
GGCGAGCAGAGGAGCAGCCACTCAAGGCTGCAGGGAGAGCTCCAGGCAGAGCAGGAGCAGCCATAGCTCC
ACTCGTTAGTGGGTCAGAACCAGGCGGCGCAGAGGTTGAGGAGGACAAGAGGTGGCAGAGCCCCACCCCG
GCTCTTCATTCCAGATGGTTTGAACCCTTCGTCATCCAGTGGCTGGATGAGAATGAGGAGGTGTCCCGGG
ATTTCCTGCACGGTGCCCTGGAGCGAGACAAGAAGGATGGGGTAAGAAGGCCCACCCACAACCAAGTTCC
TAATCTTCCCACTGGGGTCAATTTAGGTGGAAATTTGCCCTTGAGATGAGGCCAGTCTCTGGTAGGTGTC
CGCCATCTTTGTCTTGCTCATGGTTTTTAAAATCTTTTGTTCATTCATCAACTACAAAATGTGAGTTCCA
TCAAGCCGGACACCTCCAGGCACCCCATGGCTTCTGCGTCCACCTCTAGAGTTGACTCTAAGTCTACCTC
GCCCTCTGTCCATCTCACCCCGGGGAAATTGGTCTCTGGCTCTCCCCGTGGAGAGTGGGAGAGTTGGGCT
CTAGGGATTCTCTGGTGCTGATCTCCTCCTTCCTCTTGGCCTCCTTCCCCCTGCAGTTCCAGCAGACCTC
AGAGCATGCCCTATTCTCCTGCTCCGTGGTGGATGTTTTCTCCCAACTCAACCAGAGCTTTGAAATCATC
AAGAAACTCGAGTGTCCCGACCCTCAGATCGTGGGGCACTACATGAGGCGCTTTGCCAAGGTGTGGGAGA
GTGGGTAGGGTTGGGGCTAGGGGACAGGGTCAGGGTTAGGGAATTGAAGTCTGAGTTGGAGATGGGCTAA
GGTTGAGGTTGAGGTTGGAGTTGGTGATGTCATTGAGGTTGGGATTGAAGTTGGAGTTTGGGTTGAGGTT
GGAGTTGAAGTTTGGGTTGAGGTTGAGGTTGAGATGAGGTTGGAGTTGAGGTTTGAATGGAGGTTGGAGT
TGGGGTTAGGGTTTAAATTGAGATTGGAGTTGAGATTGGGGTTGGAGTTGAGGTGTAGGGTAAGGTTGGA
GTTGAGGTGTGGGTTGAGATCAGGGTTGGAATTGAGGTCATTAGTGCGAGTTGGCAATGCTGTTTGGTTG
GAGTTTGAGGCTGTGCTGGGTCTTGATTTGGAATTGAGATTGGAGTGAGTGCTGAGATTGATGCACAATT
TGAGTGAGTCTTGGGGTGAGTTTGAGGGTTGGGATCATTGGGGTTGAGGTTTGATTCATTGGCATTAGGC
TGTGTTGACCTTGGGAATTACAAGTAGGAATTGGCTTTTGATTTGAGATCAGGTCATCTTGTGGTTGAGG
CTGGGTTAATATGATGCTTGGTTGCTCTGAAAAAGAGCTGGGTCTACATAAAATGATCATCTTCATCGAG
CGGTATCTCCTCTAGGTCTTGATGGTCATCTTGAGTGGAGAATTTGCCTAGCCCAAAGGCCCATCTTAGG
TCCTAATAGGGTTTGGGTTCATCACTGATCTCACTAGTGGCCTTGATGGGACGACTGGCGCCTGCCTTGG
TGCCAGCCTCTCCTCTCACCCACACTCTGTGTCTTCCCCAGACCATCAGTAATGTGCTCCTCCAGTATGC
AGACATCATCTCCAAGGACTTTGCCTCCTACTGCTCCAAGGAGAAGGAGAAAGTGGTGACCTGAGGGGGC
CCCTGACCTATCTCCCTCCTCAGCCCCATTCAGCATCCCCAGGACTCCCTTCTCCCCAGGGCCCTGACAC
CTGGGGCTATGTATGTCCACCTGTGTGTGATCTGACTGGATTGTCTGTGTGTTTAGAGGTGCTTGTTTGA
ATGTGTGTGATCAGAGTGTATCTAGTTGTGTGTGTCTGAGTGTATGGGAAGTAAGTGCATGTGTCTGACT
GTGTATTGTCTGTGTTGACTGGTATACTCTGCGTGTGTGTGTGTGTGTGAGTCTGTGCACATCTGAGTGT
GCGTGTCTGATCATGTTTTGTCTGGCTTTGTTAACAGGGTATGGCATGAATGTGTGTGTGAGTCCAACTG
TGCACGTCTGAGTGTGCGTGTGTGATTGTGTTTCGTCTGGTTGTGTTAACTGGGTATAACATGAGTGTGT
GTATCTGTGTGATTGTGTTTCGTCTGGCTGTGTTAACTGGGTATAACATGAATGTGTGTATCTGTGTGTG
TCTGTACATATCTGAGTGTGGGTATCTAGCCATGTTTCATCTGTGTTAACCGGGTATAGTGTGAGTGTAT
GTATGTGTGAGTATGTGTGTTCAACTATACAACACATCTAGGTGTGTGTCTCATATTTTATCTAGCTGTG
TTAACTGGTTATAGTGTGAGTGTGTGTATGCTTGTGTGTGTGTCCAGCTGTGCATGTCTGGGTGTGTGTG
ACCGTGTTTTGTCTGGCTGAGTTAACTGCATATAGTGTGAGTGTGTGTGTGTGTTTGTGCACGTCTGGGT
GGGTGTGTCTCACCAGGTTTGGTATGGCGGTGTTGAATGTGCGTGGTGTGAGTGTGTGTCTATGGCTGTG
TCTGGCTGTGCATGTCTGAGTGTGTGTATCTGTGGGGGGGGTCTCGTGTGTATATCTCGGGGTGAGGGCA
CACGCCTTCAGTGTGTCACTGTCTGGCTGTTGCAAATGAAGCCTTCAGGGTGTGAGCTGCAAAGCTTTGG
GCTCTTGCAGGAAACTCTGCTACTCCCAGAGTTCCCAGCCCCTCTCATGGACCCCCCACCAGGCCTGGGG
TCGTGGGATTACTTGAGTCCTCCTTGCCCCCACCAGTCCCCAGAGATGCCCGCCCCAACAACACGCCCAG
GAACCTGAGCACAAAAGCTCCCTTCCATTTGCAGGTGACCCCATGGGACCCCAGCTTCCTCCAGACCCAG
ACCCTGAAACCATCCCAAGGTCCCTGGCGGTGGGTAGGGGAGGCTCTGGGGAGAGGTCCTGAGGCTTGAC
TCCCCTCTCTGTTCCCACCCACAGCCCTGCATTCTCATGAATAACACTCAACAGCTACGAGTTCAGCTGG
AGAAGATGTTCGAAGCCATGGGAGGAAAGGAGGTGAGGCAGGGCCGAGGCAGGGCTGGAGAAGGGATGGG
GCACCCCCACCACTGTGTCCCTGCAGGCCCCTGAGCTCATATGCCACCAGGCCTGGGGATGAATTCCAGC
TCAACCATGGCCTTAAACCCAGGCTTGCAGCATAACGGTCTGTGCCTCAGTTTCCCCTGCAGCCCCTTGG
GATCCCTTTCCCTGGGTCAGATGAGAAAATGCCCAGTACATGTGGATACTTACTGAACCTGGCCTGGTGT
CCCTTCTCCCTCCTTAGCTGGATGCTGAAGCCAGTGACATCCTGAAGGAGCTTCAGGTGAAACTCAATAA
CGTCTTGGATGAGCTCAGCCGGGTGTTTGCTACCAGGTGGGAGCATCTCCAGGGCTGGGGGCAGTGGGGA
GGGAACAGCCTTCAGCCCTCTAAGCCTGGGGCATCTGGAGGCTCAGCAGATGTAGAGGTGAAGATTGCAG
GCTCAGAGTTAGACAAGGCTGAGTTCAAATCTTGGCTTTACTGCTTACTAGCTGTGTGGCCTTGGGTGAG
TCACTTAACTTCTCTGAGCCTTATTTTTTTTTTTATTGCTCTGTAAATTTGGGGTGATGACAATAATAGT
ACCTGGGTAGGATTTTGAGAATGAAATGAACAATGCGGGCAAATGTCTTATCCCTTTGCCTGGTTCTGCA
GTTACTATTTTCCACTCTTTTTTTTTTTTTGAGACGAAGTCTCGTTCTGTCACCAGGCTGGAGTGCAGTG
GCGCGATCTCGGCTCACTGCACCCTCCACTTCCTGGGTTCAAGTAGCTGGGACTACAGGTGCATGCCACC
ACACCCAGCTAATTTTTGTATTTTTAGTAGAGACAGGGTTTCACCATGTTGGCCAGGGTGGTCTCGATCT
CTTGACCTCGTGATCCGCCCGCCTTGGCCTCCCAAAGTGCTTGGATTAAAGGCGTGAGCCACCGCATCTG
GCCTGTTCTCCATTCTTGCTCGGTTATGTGCTGTGATGCAAATGATATGACCTCAAGGACCACAGATCAG
CATCTGTGTCCTCATCCAGCCCTTCCTGTGGTCTGAGCCCTTCCCTTCTGTGTCCCCAGCTTCCAGCCGC
ACATTGAAGAGTGTGTCAAACAGATGGGTGACATCCTTAGCCAGGTTAAGGGCACAGGCAATGTGCCAGC
CAGTGCCTGCAGCAGCGTGGCCCAGGACGCGGACAATGTGTTGCAGCCCATCATGGACCTGCTGGACAGC
AAGTGAGCTGGGCCAGGTGGACTGGGCTGGCCGGGGAGGGGCTGGGGCAGGGCCATAGAGACCCAGGGAC
TGGCTGGAGAGGGTGTGCAGGGAATGTTTGCTGGGTGGTCACTGGATAGTTGGATGGCTGAGTAGATGGT
GGCATGAAGGGGATGGAAAGTTGGGTGGGTAAATAATTGGAAGGATTGGTGAGTAAATATTTGTGTGGAT
GAATGAATGGTGGATGAATAGGTGACATGAGGGATGGGTAGGTGGGTGGACGCATGGATTAAAAGATAAA
TGTTTAGAAGGATAGAGGGAGGATAGATGTTTTAAAAAGATGGATGGGTGGATAGTTGGGTAAATATTTG
GATGGATTAATAAATGTTTTGATGCATAGATGGATTGATGCTTAGATGGATGGATGTCTGGCAGGCTGGC
TTGATGGATGGTTGGATGGACGATGGATGGATGGATGGATGGATGGATGGATGGATGGATGGATAAATGG
TTGGATATGTGGATAAATATTTGGATGGATGAATAAATGTTTTGATGCATAAATGGATGGACAGATGGGT
GGATGGATGAATAAATGGATGGGTGGGTAGATGGATGGATAGATAGGTGGATAAATATTTGGATGAATGA
ATAAATGTTTTGATGTATAGATGGATTGATGCATAGATGTCTGTCTGGCTGGCTGGATGGATGGATGGAT
GAATGGATGGATGGATAGGTCAATAGATATTTAGATCATTGAATAAATGTTTTAATGCATAAATGGATGG
ACAGATGGGTGGATGGATGAATGGATGGTTGGATGGGTGGGTGGGTAGATGGATGGATGCTGGATAGATA
TAGGTGGATAAATATTTGGATGGATAAATAAATGTTTTGATGCATAAATGGTTGGACAGATGGGGGGGTG
GGTGGATGAGTGGGTCGATGGATGGATGGATTAATAGGTGAGAAATATTTGGATGGATGAATAAATGTTT
TGATGCATAGATGGATGGACAGATGGATGAATGGACAGGTGGATGGATAGATAAATGGATAAGTGGATGG
ATGGGTAGAAGGATGCATGGAAGGATGGATGGATGAACAGATGGATGGATGGATGGATAGAAAAAGAAAT
AGAGAATTAAGGACCACTGGGGGAGGGATGGATTGGTGGGTGACTGGATCAGTTGGTGGATGGATCTTGG
TGGACTGCCTGTCTCCTTCAACCCCTATCCATCCAACCACAATCTCTTTGCTGTTTTCCCTTTCAAGTCT
GCCCTCCTCTGACCATTCCCCTCCTGTTCCTCTTGGGCATGGCCTTCTCCCTCATAGTCCCTGATCTCCA
TCCTTCCTGTTTCGGTTCATCCCCCACACTGTTCTTTCAAACATGAAAGTCTGGCTGTGTCTCCCTCTTG
AACACTCCATGGCTCCCCACTACCCCCATCCTGATAAAACCCAAGCCTTCCTCCCAGACATTGGGGCCCC
TTCCCATCTGGTCCCTGCTGACTAGTCCAACCACCACTCACTCTTCTCTTCATGCATCAGATATCATAGC
CCCATCAAACCACCCAGGGGTCCCTGTACAGGCTGTGGGCCCTCTTTCCTATCTGTGGAATGCCTTGCCC
ACCTGTTAAGGGAAGGTGATCTGTGGGTGGGGGCGAGCTGGGCCCTCTCTCAGACCTGCCCCTCGTCCCC
AGCCTGACCCTCTTTGCCAAAATCTGTGAGAAGACTGTGCTGAAGCGAGTGCTGAAGGAGCTGTGGAAGC
TGGTTATGAACACCATGGAGAAAACCATCGTCCTGCCGCCCCTCACTGACCAGACGGTGAGACCTGCAGG
GGGCCCGAGGGGACATTTAGGCCACCTCCCTGGCGAGAGCCCAGAAAACTTGGTGCCTAGAGGCTGGGGG
GTAAGAACAAAGGCATCCGGTCTCAGAGAGGTCATCCAGGCTCAAGGGCCATTCAAGGGTCATGGAAGCC
ACCAGAGGTCAGTGGGGGGCCATTCAGAGGTCAGAGAGTTCACACAGGGGTTAAAGATCATCGAAGAGTT
AAAGAGGTCATTCAGAGTCCATTGTATTTTCTCTGGGGTCAAAGACATCAGGTAGAGTCAAGAGACCACT
AAAGTCATAGAGGTCACATGTAGGTCAAAATAGCTTTCAAAGGTCAGAGGTCATCTAGAAAACAGGTCAA
TTTTGGGATCAAGGTTATCCTTGAGCCACGGAAGGCATAGACATTGGCCAGGCACCGTGGCTCACGCCTG
CAATCCCAGCACTTTGGGAGGCTCGAGGCGGGCAGATTGCTTGAGGTCAGGAGTTCGAGACCAGCCTGGG
CAACATGGTGAAATCTCGTCTCTACTAAAAATACAAAAATTAGCTGGGTGTGATCCTGTGATCCTGGCTT
CTTGGGAAACTGAGGCACGAAAACTGTTTGAACCTAAGAGGTAGAGGCTGCAGTGAGCTGAGATGGCGCC
ACTGCACACTCCAGCCTGGGCAACAGAACGAGACCCTTTCTCAAAAAAACAAAAAAAAAAAAGAGAAGGC
ATAGACATCAATGGGTTTTTCTAAGGGCTTTGGGGCTCATTCAAAAGCCAAAGAGGGGAGACACCATGGA
CTTCAGACATCAGAGATCAATAGACCAAGGGGCTCCTGGAAGTCAGCCAGAGGTCATGGAGGGCATCCAA
GGTCAGAGAGGTCAAGCAGAGATCATTGGCCATCCAGAGACCAGGACCGATAGACCAGAGGCCATAATCT
CTAGGGACCAAGGGGACCCAAACATCTGTAGAGGGATGTAGCTGGGCGTGGGTCCCTCCGGGAGGCATCA
AGAACCTGAGGACAGCAATGGCATGTGGGCTGTGGGCACATTAGGGAGTGGGGAGGTCTTTCCCAGGTGG
ACCACGGAGGCTTGGGGAGGGTGAGCGGGGGCCATAGATGGGCGACGATGGTCGGGGAGGCTCGGACTTC
CCATCCTTCCACCTCTTCTGGGCTGGGCTGGGGCAGGGGTCTTGCCCCTCCGTGCTGCCATCTCTGCCCC
CTCCCTGGCCTTCCCGGGAGACTCATGGTACCTTATTCCCCCCTCCCCCACCGCCCCGCCCCCATCACGG
ATGACAGATGATCGTAAGTAGAGTCCCGTCTGTCCGTCTGTCTGTCCGTCCTCTCTGTGTCTGGACTCGG
CCCACCGCGTCGCTGCACCCCTCTCCCCACCCACCCAGCGCCCCCTCCTCACCCACCATCCTCCCTCCCG
CCTAGATGTGCCTGTGTCTGTCTGGGGCGGGGCATGGGGAGGGGGCGGGGCTGGGAGGGAGGGAGACCAC
GCCCACCCTCCCTGTCCCACTGAAGTCCAGAGGAGCCCCACTACCCACTCCCAAACCCCAAGCCCAGCTC
CTCCTTCGCAGCGGACCTGCCGTCTAAGGGTAGAATCCAACCTTGCTCCCGTGCCCAGATGTCACCAGAC
GCCCTGAAGCTAGAAAGAGGATCAACCCCAGGATTCCTCTGACCTCCTCTTTGGGCTCTGAACTGTCAGC
AGCTTCCCAGAATGCAGGTCCTCACCATGAGGGTCTCTACTTCTGATTCCTCTGAAATTCCATGCTCCAG
ACCATTCCTTGGTACCCCACCACCCTGTCTACCCAACTCCCGCCATCCACACCGACACACACCAATCCCA
GACATACACCCAGGTGCCCAAGTGGGAGACTTTTGTCATGGCTTTGATGTCAGGTAGACTTGGGGTCAAA
TCCTAGCCCAGCCACTGTCTCTCTCTGTGACCTTGGGAAGTCACTTGACCTCCCAGCCTCTGTTTCCTTG
TCTGGAAAATGGGGCTCATTGCATCACCTCCCTGAGGGTAGTTCTAAGAACCAAATGGCATGATGCATTA
AAATACTCATCTCAGTATTGCCTGAACCCAGGAAGCAGAGGTTGCAGTGAGCCGAGATCGCGCCACTGCA
CTCTCAGTGACCGGCCCAGAGGCAGAGCTAATGGTGGTGGTGGTGGTGGTGGTGGTGGTGGTGATATGCA
GACATGTGTAAGAGCAGAGACAAAACAACTTCAGATTTTCCCTTTGTGGGCAAGACAAGGCTGTTACAAG
ATTTCACTTTGTTAAAAGTTTACAAGGGCTCTTACTTCCTGGTAGCTGCAGCCTGGGTCTTTGGCTATAA
CCACTTGGTGGCAGCATACCCAACCACAGGCAATGCATTTGTAGGCAGGGGGAATAAAGGAATTCGCATT
TAATGACTCCCCATATGCCAGGCCTTCTCATAGCTCCTGTTTCAGCTCACCTTCATGATAACCCTTTGAG
TGAGGTGGATATTATTATCCCCATTTTGCAGATGAGGAAAGCTGAGGCTCAGAGAGGAGTCACTTGTTCA
AGGTCATATAGTAAATATATGCCAGAATCAGGATTCAAATTCAGATCTGTCTGAATATGCAGCCCATTTG
CTTTCCTGTTAACCCAAGAACCAAGAGTCTCATGTGTACAGTAAATGTAAATGGATTATATTTTGGCAGT
GGCTTTTTTCCCTTCTTTCTGACTTTCTTTAGCTCTGTATCTGTATCTTTCTCTCTCTTTCCTGTCTCTG
CCTCTCACACCATTTAAGAGTGAGTCACTAAAGCGCATGCACGTGTGTGCACACACACAGACACACACAC
AAACACACTATCCCCATGCAACCCAGTCACCAGTACCCTGTGCAGTGTGGATTCCCCCATCCCCATGAAT
ATTCCTGTGAGCATCCCAGCTTCCCACCCTGCACGACTTGCCAGGTTGATCACCCTGTGACATTATCTCT
GCAGGGGAACCTCTTGAGAAAACATGGCAAGGGATTAGAAAAGGTAATGAGGGCCTCGTCTCACTGAGGC
CCTGAGCTCCAGTGTCTGGGCATGTGTGTGCATGTGTGTGCGTCTGTGCACCTGGGCAGGAAGGGCAGCT
GGGGGTCGTGGGTAGGAGATAGCTCTCCTAACCAAGTCCTGCAAAACCAGAAGTCAGAGATGAAGTGATT
CTCCAGGGACAGAACGTGCAGTGTGTGTGTCCACATGTGAACTAATGTGTGTGCACAAACAGCTCCCATC
CTCCCACAGCAATACCCACAGGGCTCATCTGAGCCCTGGGCTCAGCTGAAATTCTGTGCCTTCTTGAGGA
GCCTACACGCTAGATCACCACCCTGGACTGAGACGTGTTGTTTTTTACGTAGATTTCTTTTTGTTGCTGT
GCTAATGGGTGTTTGTTGTTAAGGAGATGGGAGCTACAGCAACACGCAAGCAGCTGTCTTGCTGTACACT
TGTGCAGAAGATATCGTTGTACATTTGTGTCTACAAATGGAGTCTTAGCTTTGTGAATGTGGGTCACAGG
GGTTCCGTACTCTCTCTGCCAGCCCTTTGCGGGGCACATTCAGTGTCCCAGGCACCCTATATGTGGATGT
GAATCCGTGTGGGGTCAAGAAGGGTGTGTGGGTTTTTGTGTGTGATATAATTGTGTACGTGCCTGCAAGT
GTTTAGGAGTGCACGTATGTAGTTTAGTGTATGGGTTCTTCAGCACTGAGTGAACTTACAGTATATGTTA
ATATGTTTTTTGTAGACTTGGGTGCTGGGATATAGGGGCAGCCCCTTAGGGAATGGAGGAGGAGACAGAT
TCCTAGCCCTGTCTCATCTCCCCACCTCCCCAGGTGCCCCATCCTGGGGCAGGCTGACTGTGGGATGAGG
CTGCTTCCAGCCTCCTGGGTACCCCGAGAGTGTGCTGGCAGTCAAGGAGTCTGACCTCTAAACCCCTGCT
AGGGGACCAGAGGAGGTGCTAGCTGGGGAGGGGGCCCACCATTAGACCCAGGACCTGGGGAGGAGCTCCT
GGGCTGGGAAGTGAGACTGTGCTTTGAGGGGGCAGGGAAGTCCCACTGAGTATCCTCCCAACAGTCACCA
GAACTCTGACCTCCACCTGATTCTCTCCACAGGGCAGGGTGAAATTGCCAAGCCACTCAGACGTAAGACC
GGCCTCTCACTGTCTGTCTGGCTCCCATCCCACTCCCCCCCACCCCACCCCTGTGCCCCCTTCCACCTCT
GTGGTTCGTGCCGTCCGAGGGCGTACTGTGAACCTGTCTGTTGGTCTCTTCTTCCTTTGTCTGTCTGGCT
TGCTCGTGGGGGGTGGTGGGTGGGGGGTTGGTGGGTAGGGCAGAGGGTACCCAGGAAGGCCCCTGAGCCC
TGCCAGACTACAGGTGGGTGCAGCAGGGGAAACTGAGGCCCAGTCCGCTGGACCCCTGAGTAACTGTGCC
TTGTAAGAACCTCAGGATCACAGACAAGAAATAAGAATAGTAACAGCCAAGATGATAATAGTAATACCTC
TAGGAATGACCAGATGGCCAGCTGGTAGACTATGAACATAATTCCAAATATTTCCACAGTAAATGGGCCC
CCTCCCCACCTAGCCTCACCCAGGACCCCCAGACCACCCCAGGACCCAGTAAGACAAGACTTGTTACCTC
AATACTCAGCCCCACCCTGTCCCCCAAGTTACCATGGGTATCCCTGTTAGCCACAGTGGGAATTGAGGCT
CAGAGCATTCAGGGACAAGCCTGGGGCCATCCAGCAGTGACAGAGGAGGCTAGACACATGCCTTCCAGGC
TGGGACCCCGTCTCCCTTAGCATTGCCCGTGACTTTGAGACCAAGTGATAATTAGCGAACACTGAGCAAA
GACTTGTTCAGTCCAGACTAAGCCACAAAGTGGATATAATTTTCCTCATCTAGATGGGAAAACTGAGGCT
CAGAGAGGTTAAGTGCCTTGCCCAGGGCCACACAGCAGGACTGCAATTTGAACCCAGGCCCATCTGGCTT
GTCAGAGCCATCACCACATCACCATCTTGCTAGTGTCTGTTTGGGGGTGGGGTGGAGGACGGATATGGAG
GTGTTTGTATAGAGGGAGGATTTTTCCTTTAAAAGGTCAGACTGGCTGGCAATGTGGCTCACGCCTGTAA
TCCCAGCACTTTGGGAGGCTGAGGTAGGAGGATCGATTGAGCCCAGGAATTCAAGACCAGCCTGGACAAC
ACAACAAGACCCCATCTCTATGAAAAAAATTTCAAAAACTAGCTGGATATGGTGGCTCACACGTGTAGTC
CCAGCTACTGGGGAGGCGGGAGGATTGCTTGAGCCCAGGAGTTTGAGGCTGCAATGAGCTATGATCATGC
CACTGCACTCCAGCCTGGGCAACAGAGGGAGACTCTGTCTCAAAAAAAAAAAAAAAGAAAAGAAAAATCA
GACTGAAATTCCTCCCAGATTACAGGGGAAATTTCCCTGCAGAGGGGATGCTCCTTGAGGAGGAGGAAGT
GTTTGACCAGAGCCATTTTCTGCAACCTCAGCCTAGCCTATTGTGTTCCCAAAGCTCCCTTTCCCTGGAA
ACCCTGCCCACACCCACAAACACCACCGTCTGAGGCTCCCCCAACCCACTGCCCCTCACAGTCTGGTCCC
TGTCTGTTTCTCCTGTTACACAAGCCTGGGTGGGGCTGAGAGGGTGGGGGACTATCCTCACAGGACCGGG
ATTTTCAGGGACAAGGTCACCACATCCTCCTCAGTTCTTCCTGGGGAATTCCAGACCTCTGTCCCTGGGA
CACAATTATTGCCCTGCCCAGAGCCTTTGGGCAAGAACCAAGATGGTCTCTGGGGCTGGAGTGTCAGCTG
TAGCACCCCTGCCCTCACCCAGCTGTATGTTGTTACCTGCAGGGAACCCAGATGATCTTCAATGCAGCCA
AGGAGCTGGGTCAGCTGTCCAAACTCAAGGTGAGGAGTGGGGATAGATTATGGCGTGAGGGACTGCCCCC
CAAACTCATGTGGCTTCCAGGTTGCCACCATCCTGGGGGAGGGGTCCCAGGATGATGACATGCATTACAG
GCTCAAAGGACAGAAACTCTACTCACTGAAGCACAAGATATTTGCTCCCCAGTGTGTCAGAAAGATGTGA
ATGGTTCAGCTTCAGGTACAGCTTGATCAAGAGGGCAAGTCATTTATTCAACCAATATTTTTTGAGCACC
TGCTGTGTACCAGTCACATATTGGGTGCTGGGATGATGAAAACATAGACCCTCAGCCCAGCTCCTCCAAG
TTGAACAGGGATGAGACCCATAGACACAGATTCCAAAGGTGGAGCCCACTCCACCCACATGGCCCCTCTC
CCCATCCATCCAGGATCACATGGTACGAGAAGAAGCCAAGAGCTTGACCCCAAAGCAGTGCGCGGTTGTT
GAGTTGGCCCTGGACACCATCAAGGTGAGAGGCCCTACCCCTCCCCATCCCAGGTGGGGGATGTAGAGGG
TGTGGCTGCTGTGGTCATGGACTTAGGCTCGCCTCGGACCCACATTAATTTGTTCAATTTATGGACACTC
CCTCGTTCCCCTGTCTGTGCCAGAGCTGGGCTGGCTAATGCTGGAGCCTTAAGGAGCCCCAGGTCGGGGA
AGACTGCTGGATACAGACATTCTCAGCCTTGTAGGATTAGGCTTGGGGTAGAGGGAAGGATGTGGGCTGG
GGGAGCCCAAAGAGTGAGAAGGTGTAGAGGGAAGGATGTAAAGGACCTCGTGCCAGGCATTTCTTGAGGT
GTAGAAGGGTAGAGGGAAGGATGGGGGCTGGGCGAGCCCAAGGTGGGAGAAGCCAGGCCTTCCTGGAAGA
CGGCATGTGAGAGGTGGGTTCTGAGGAATGCATAGGAGTTCACTAGGCAAAGCAAAGGAAGAGGTGAGAA
AGTAGTAGCGGGAAGAATTGGGAGTGGGGACAGCAGGGCTACCCAGCCCTATGAGTGGGTAGAGGTTCCC
ACCATCCTCACCTCTCCCCACCCTGTCCTCCCCAGCAATATTTCCACGCGGGTGGCGTGGGCCTCAAGAA
GACCTTCCTGGAGAAGAGCCCGGACCTGCAATCCTTGCGCTATGCCCTGTCGCTCTACACGCAGGCCACC
GACCTGCTAATCAAGACCTTTGTACAGACGCAATCGGCCCAGGGTAAGGGTACCCAGACCGCATCACCCT
TTCCCGCTCCGCGGAGACAGCCCCGCCCCAAGCCTGAACGGCTGCCATTGGCTCACTCCCCTGTGACGTC
ATGGATGGGGCGGAATTGACATCTCTGCACCAAGTCCAGGGACCAATGAGCGATCAAAGGTTCATGGGGG
CGGGGCCTCTGACGTCACAGGCCTGGAGGTGATCGTCAACCCCTGGGAAAATCTGTGATGTCCTGGGGCC
AGACAATGATTAACAGCTCTGGGATGGAATGTCTTTGACATCAAGGACCAGGGTAGGATTGATGACTCTT
AGGTGTGGAACCTGTGACGTCGTAGGGCCACAAGGTGATTGTCATCTCCTGGGAAAATCAATGGTGTCCC
AGGGCCAATGAATGATTGTCAGCTCCTGAGGGACCTGGACAGTCATGGGTCCAGGGAATCGTTGACAGCT
CTGGGAGACTTCAGGAGTGATTGACAGCTCAGGATGGGCAGGACCTCTGATGTCAAGGGGTCAAGGAATG
ATTGGCAGGTCCATGGGTGGGAACTTTGACGTCATGGTCCCAGAGAGTGGTTGAACTCCCCTGAGGAGGG
ACCTCTGTGATGTCATGGGGCTAAGGAATGATTGACAGCTCCGAGGGCGGGAGGGACCTCGACTTGGTGG
GGGAGGGTGGACGGAGAGGGAGTTCCCATTTCTCAAACTCTCTCTTTCTCTCTGTATTTTGCTTCGGTCT
CCTGTCCCTCTCTGAGCGCACACACACGGCAGCTGGGGCTGGATGGAGGGCAGGATTCCCTGGGGACCCC
CCCTTTTCAAAATTGGTCCCGACAAGGGGAAGAAGTTTGGCGGCTTGAACTCAGGAGGGGGAGGGAGAAT
CGCCATCGACACCCAGCCTGGGGCGAGGGGAGCAAAGCCCTGTGGCCTCCAACGGCCCCCTTCTCCCCCG
ATCCAGCCAGCCCAAGGGCCCTCCGTGGGCGCTGGGTCTCTGAGCTCAGCTTCCCTTCCAGTCCTGGCTG
CTTTTAGTGTCCCTGGTGTCCCTGGAGCAGGAGGCTGTCTGTCTCTCCGTCTGTCTGCAGCTGACGTTTC
TCTCTCTCTTGTTTTTCCTCCCTCTCACTCGCCGTCCCCTCTCCGCGCCTCCCCTGCCCCCTCCACACAC
ACTCCTCCATCCTCACCTCTCACTGGCTCGTCTCTCCCCGCTCCCCATGCTTCCCACCTCTCTCCCCCTT
CCACCCCCACCCCCAATTAGTCCATGGTGGAAAAGGTACTAGGTTTACCCTTAGTGAAGACATTTATCCT
GAGAAGGGTACGTGCCTCCGCCTCCCGCCCGCCGCCCGCGCCTGGTGCCCGGTGCCTGCGCCCCTCCTGG
CCCCGGCTAGTAAAAGGATCGTCCTTCTGCCTCAAGGGCCTGCAGGGCCGCCGCCCAGGCCTGAGCGGCT
TGGAGGGCCCAGGCGGGTGAGGGGGAAGGACGATTTGCTGGTTCTACATGGGGAAGAAGCGATTCCAGTG
GGAATCCCAGAATCCATTTCTCCTGATATGACATATTTTTTAAGCCAGATCCTGGGACCCCGGGACAGGC
ACCTGTCAGGTTAAGAGCTGGGCTCTGATTCCAGCCCAGCCACTCCACGGGTAGGCACCTTGGGCAAGAA
TCTGTCTCCCTGAGCCTCAGTTTTCTCATCTGTAAAATGGGGACAGTCAAGGACCCTACTTCATAGGATT
ATTGTTATTGATATTATTATTTAGAGACAAGGTCTCCTTCTGTCACCTAGGCTGGAATGCAGTGGTGCAA
TCACTGCTCACTGCAGCCTCCCTCCTGTGCTCAAGTGATCCTCCTGCCCCAGCCTCCCGAGGAGCTGGGA
CTACAGGCACACGTCACATGGCTAGCTAATTTTTAATTTTTTTTGTAGAGAGGTGGCCTCACTTTGTTGC
CCAGGCTGATCTCAGTGAATACTTATCAGGCTCTAAGGCTGAGCAGGACCTTGTGCCAGGCATTTCTTGA
AGAATCTGTGTTTGGTTTTGTTGTTGTTGTTTGAGACAGAGTCTCACTCTGTCACCCAGGCTGGAATGCA
GTGGGGAAATCTCAGCTCACTGCAACCTCCGTCCGCCTCCTGGTTTCAAGCGATTCTTGTGCCTCAGCCT
CCTGAGTAGCTGGGATTACAGGCCCGCACCACCACGCCTGGCTAATTTTTGTATTTTTAGTAGAGACGGG
GTTTTGCCATGTTGGCCAGGCTGGTCTTGAACTCTTGGCCTCAAGTGGTCCACCCATCTTGGCCTCGGCC
TTCCAAAGTGCTAGGATGACAGGTGTAATCCCAGCGCCTGGCCATTTTGTTTTTAATTTGAGGCAGACGC
TGTCACCCAGGCTGGAGTGCAATGGCGAAATCTCAGGTCACTGCAGCCGCCACCTCCTGGGCTATGTTGC
CCAGGCTGGTCTCGAACTCCTGGCCTCAAATGATCCTCCCACCTTGGCCTCCCAAAGTGCTGGGATTACA
GGCATGAGCCTCCATGCCTAGCCTTCTTGGGGAAACTGAAACAGATTTCTTTAACTGCCCCACGAGGGGT
ACATCATTCCACAGATGAGATACTGAGAGCCAAAGGAGATTCAACCACTTGTCCGAGGAACCTTCCCCTG
CAGGGGTCCCGGGACTTGGGGAGTGGGGAGTGGGGTTGGAAGAAGCACTGAGAGGCCCAGGAAAGACCCT
TCCCCGCGAAGCCAGCAAAGCACGGGATGGGGGCACCCAGCACTGCCTCCCTCCCCCCTTCTTACTAGCT
TTGGCCTTGGTCTGACCCCTCACCTGACCCACCACTGTCCAATTCCCCCTGGCACCCCCGGCACCCCAGT
CTGGCCCGGATTGAGCTTGCTATGAAGCATCGGCCTGGGGGAGGGCGGGGCGGCTGAGCATGTGACTGGT
GGCGGGGGGTGGGGGTGGAATGGGAGCCTGAGGCAACAAGGAAGACGGCCTGGGGCGTGCAGCAAAGACC
GGGGCCACATACCCCAGTACTGGGGTGATGGGGGTCTCCAGGCCCCTGTGCTCCCCAACCCTCAGTCACT
TCCTGTCCAGCGTGAGGTAACCCAATCAGCGTTTGACTGACCCAACCTCCCACCCTCACCTCTGACTTTC
CCCTTCTTCTCCCCGTGCATGGGGTGGTCCAGGAGTGGGGAGTTGCCTGGTGGGGGGTGGGGAGGGGTTG
GTGGAGGTGCTGGCGGTCACAGGTCCACAGGCCCCACAGGATGCCCTTTTGAGTCACAGAAGGCGGGACC
GGGAGAGATTCTTTTAAGCTGCCCCATCAGTGATCCCCATTGGCACCATGGAGGACACGGCTGGTGGCCC
CAAACAGAAGCCCACCACACCATGATTCAAGCAGACAAGGGAACTTTTTGACTCCATAATGGAAAAATTA
GGGGTTGAGGCCTGGCGCGGTGGTGCATGCCTGTAATCCCAGCACTTTGGGAGGCCAAGTTGGGCGGATC
ACTTGAAGTCAGGAGTTTGAGACCAGCCTGGCCAACATGGTGAAACCCCATCTCTACTAAAAATAACAAA
AATTAGCCAGGCGTGTTGGTGGATGCCTGTAATCCCAGCTACTCAGGAGGCTGAGGCAGGAGAATCGCTT
TAACCTGGGAGGCGGAGGTTGCAGTGAGCCGAGATGGTGCCATTACACTCCAGCCTGGTGACACAGCAAG
ACTCTATCTCAAAAACAAAAAAGAAGGCCAGGTGCGGTGGCTCATGCCTGTAATCCCAGCACTTTGGGAG
GCCGAGGCGGGCAGATCACCAGGTCAAGAGATCGAGACCATCCTGGCCAACATGGTGAAACCCCGTCTCA
AAACTACAAAAATTAGCTGGGTGTGGTGGTGTGCACCTGTAGTCCCAGCTACTCAGGAGGCTGAGGCAGG
AGAATCGCTTGAACCTGGGAGGCCGAGGTTGCAGTGAGCCGAGATTTCGCCATTGCACTCCAGCCTGGGC
GACAAAGCAAGACTCCATCTCAAAAAAAAGAAAAAAAAAAAAAAAAAAAAAAGAAACTTAAGATTCTGCA
CTAGAAGGGAAATAGGGGTAAGGAAAATAAAAGATGCCGCTATGAGCTGTCACATCAGGAGGGATGAGGA
TTCTGGGCCAGGTGATGCAATGAGGTGACCTGTGGGGCTGGGTCAGAGTTAACAAGGGCAAGAATGGGGT
GAGTGGGGAGAGGTAATAGTAACCTATTGGAAAGGGCCACTATTGGAAGGGGTGTTGCAGGTCACAAAAA
CCACTTTGATTATCTCAGAGTGAGGTGGGAGCCATGGAAGAGTTTGGTTTTGCTTTGTTTTGTTTTTTGA
GACAGTCTTGCTCTGTCACCCAGACTGAAGTGCAGTGGCGGGATCATAGCTCACTGCAGCCTCAACCAGC
TGGGATTAAGCGATCCTCCTGCCTCAGCCTCCTAGATAGCTGGGACTACAGGTGCATGCATCACCACACC
TGGCTAATTTTCTTTTCTCTCTCTTTTTTTTTTGAGACAGGGTCTCTCTCTGTCACCCAGGCTGGAGTGC
AGTGGTGCAATCTCAGCTCACTGCAACCTCTGCCTCCCAGGTTCAAGTGATTCTCCTGTCTCAGCTTCCC
AAGTAGCTGGGATTACAGGCGTGCACTACCACACCCGGCTAATTTTTGTATTTTTAGTAGAGACAGGGTT
TCGCCATGTTGGCCAGGATGGGCTTGAACTCTTGACCTCAAGTTATCTGCCCACCTCAGCCTCCCAAAAT
GCTAGGATTACAAGCATGAGCCTCCCAAAGTACTGGGGTTACAGGCATGAGCCACCACTGCCCGACCCAT
GGAAGAGTTTTGAGCAGAGGAGGGACATGATCTGACTTTTAAATGTTATTTATTTATTTTTTAATTTTCT
GAGACAGGGTCTTGCTCTGTCACCCAGGTTGAAGTGCAGTGGTGCGATCTCGTCTCACTGCAGCCTGGAC
CCTTCTGAGCTCAAGTGTTCCTCCCACCTCAGCCACCAGAGTAGCTGGGGCTACAAGCACGCCCCACCAT
GGCCACTAATTTTTGTATTTATTGTAGAGATGGGGTTTTGCCATGTTGCCCAGGCTAGTCTCAAACTCCT
GAGCTCAAGTGAGTTTGCCTCACCCTCCCAAAATGCTGGGATTACAGCTGTGAGCCACCGCGCCCTGCCG
ACATGATCTGACTTAATAGGATTTTTCTGGCTGGTATACTGAGAGTAGATGAAAGAGTGGAAGGAAGACC
AGCAAGGAGGCTACTGCAATAGTCCAGGCATGGGATGCTGGGGGCAGGTGTAGGATACAGGGAAAAGACA
TGGCTCTGCTTCTGGATGTATTTTGAAGGTAGAGCTGGCAGGATTTTCCAGTTTATGGGCACCTAGGGAG
GAAGTGAAGACAAAGAAGAGTGTCAAATATTGAGGTGCAGGGTCAGTTTGAGGACCCACGGAGGAGAAAA
TGACAAAAGGGGGTTGGAGGGAGTGACAACTATGTAGGATGAGAATCGAGTTGGTGACATTGTTGCAGCC
AAGAGGACAAACAGCCACAGGAGGCCAGGGTGCCAGATGCTGCCAAGATGTAATGTAACATGAAGACTGA
ATTTTGACAACATGGCAATCAATGGAATAAGAAAAAAGAAAAGAATTGCATTAGGCTCAGAGAGGTTAAG
CAATCTACCCAAGATCACACAGCAAGGCAGTAAAAGGCCAGAACCCAGGATTCTTGGCTTCCCAAGAGCA
CCTCCCATCCTGGCCCCCCATCAGTGCCTCCCTATCAGGGCTGATGACCTGGTGCCGCCAGCACAGGTGG
GTGGGAGGCCGTCAAGGTCCCTCCTGGTGGGTGGGAAAGAACAGAGCTCACGCTGACCATCCTCCCCTGC
CCTGCCCAGGCTTGGGTGTAGAAGACCCTGTGGGTGAAGTCTCTGTCCATGTTGAGCTGTTCACTCATCC
AGGAACTGGGGAACACAAGGTCACAGTGAAAGGTGAGTGGTCTGAGGTGGGAGGGACTTGCTAGGTTCTA
AAACAGAAACCAAACTCAAACTGGCTTAAGCAACACCCTTTTTTTGTTGTTGTTGTTTAATGGTCCATGA
AACGGAAACGTCCAAAGGTGGCCACCTTCAGGCATGGCTGGATCCAGCAGTGTAAACAGTTTTGTAAGAC
TGAATCCCACTTTCTCCATCTCTCAGCCCTGCTTTCCTTTTCTTGGCTTTTGTTGACTAGAACACAGATT
GGGCTGTTTTTGACATGGCTTAAATAAGACAGAATTAGGCCAGGCACGGTGGCTCATGCCTGTAATCCCA
GCACTTTGGGAGGCCAAAGCTGGCGGATCAGGCCAGGAGTTCAGACCAGCCTGGCCAACATGGTGAAACC
CTGTTTCTACTAAAAATTCAAAAAGTAGCTGGGTGTGGTGGCGTGTGCTTGTAATCCCAGCTACTCAGGA
GGCTGAGGTGGGAGGATCGCTTGAACCCGGGAGGTGGAGTTTGCAGTGAGCTGAGATTGCGCCACTGCAC
TCCAGCCTGGGTGACAGAGTGAGACTCCATGTAAACAAACAAACAAAAATGATAGAATTGGTTTTTCTCT
GGGATAACAGTTTAAGTAGCAACCAGCCTCGAGCTGATATGGAGGCTTCGCAGTGTTGGTGATCTGTGCT
GCTGCCATCTTTTGTTGCATTTTCATCCCTAATGTGTTGTTGTTGTTGTTTGTTTGTTTTAGAGGCCAGA
GTCTCACTCTGTTGCCCAGGTTGGAGCGCTGTGGTGCAATCACAGCACACTGCAGCCTCAAACTCCTGGG
CTCTAGCGATCCTCCTGCCTCAGCTTCCGGAGTCGCTGGGATTGCAGGCATGCAGCATCACACCTGGCTA
CTTTTTAAATTATATTTTTGTAGAGATGGTGTCTCACTATGGTATCCAGGCTGGTCTCAAACTCCTGGCC
TCAAGCAGTCCTCCCACCTGGGCCTCCCAAAGTGCTGGGATTCCAGACGTGAGCCACCATACCTGGACCC
AAATGTGTTTTTCCTCCACTATAGGGTCACAAAGAGCTCAGCCCCCACAAGCATTGCAGACTGCGGCTAG
AGGAAGGAGAAAGTTTGGGGTTCACTCCCTGCCTTTTAAGCCACAGTGGAGAAGTAGTACACGTGATTTT
TTTCTCTCACCTCATTGGCCAAAACATAGTCATATGACCACACTTAGCTTCATGGCAATGCTGGGAAATG
TAGTCTTTATTTCAGACAGGGTTTTTGGCGGCGGGCGAGGGGTGGGGTGTTTTTATTTTTTATTTTTTTT
AGACAGGATCTTGCTTTGTCACACAGGCTGGAGTGCAGTGGCACAATCTCAGCTCACTGCAACTGCCGCC
ACCCAGGCTCAAGCAATCCTCCTGCTTTAGCCCCACAAGTATGTGGGACTACAGGCGCGTGCCACCACGC
CCAGCTGATTTTTGTATTTTTCGTAGAGACAGGGTTTCACCATGTTGCCCAGGCTGGTCTCAAACTCCTG
GACTCAAGTGATCCACCCGCCTTGGCCTCCCGAAGTGGTGGGATTACAAGCGTGAGCCACTGCGCCCAGC
CTTGGGCAGGTTTTGAGAGCCACAAACATCTACTTTTTCCAACTGGGAGAACCTGACCTGTCTTACCCTC
TACTTCCTCCAACAGTGGTGGCTGCCAATGACCTCAAGTGGCAGACTTCTGGCATCTTCCGGCCGTTCAT
CGAGGTCAACATCATTGGGCCCCAGCTCAGCGACAAGAAACGCAAGTTTGCGACCAAATCCAAGAACAAT
AGCTGGGCTCCCAAGTACAATGAGAGCTTCCAGTTGTGAGTTTGGGATGCTTTGAAGAGCATGGGGGCAA
GGGAGGGGGCATCCGCCAGGTGAACCCCAAAGCCAGCTAGGCAGGAGGTATCTGGAATCTGGGCCCGGGA
ATGGGAGGGGCCACATTCTAGGTGGGGGTGCTGGAAAGGGAGACCCCTTAGTAGTGCAGGAATGACATCA
GGGAGGGGACACGAGGATGGAGGTCACCTTTGGGGGCTGGCAGATCCAAGGGGAGGCAATGAGTAGAGTG
GGGTAACTTCATGATGAAGACTTGCAGAGGGGAGGGAAAGTCTGGGCAGGAAGTGCATGGTGGGCAGGGC
CATTGCTGGGGCTGGAGACTCTGTCTGGTGAAGGAATGAGGGTGGCAGTGATGACGCTTATGAGCGGGGG
GCTGAGGGACCTGGGGACAGGACTGAGGTTGCATGGGGGTGGGGACTACTGGAGTCTACATTGAGCCTTG
TCAGGACCGTTGGGGCAGCCCATCTGGAGGAGTCGGCTCTGGGGACAGGAGTGGAGTGTAGATGGATCCC
AGGCTTGGGGGTGGGTGTCACGTGGGGTGGAGGTGGGGTCACATTGGATGGAGGTTCTTGGAGTTGGGAG
TGGGCCTAGGCTGCGGGTATCAGGATAGGGTCTAGAGGATGCTGATGATGTGGACAGCATAAAAAAGTCT
GCTCTGGCCGAGTGTGGTGGCTCACACCTGTCATCCCAGCACTCTGGGACGCCGAGGCAGACAGATCACC
TGAGGTCAGGAGTTCAAGACCAGCCTGGCCAACATGGTGAAACCCCGTCTCTACTAAAAATACAAAAAAA
AAAAAAAAAATTAGCCGGGTGTGGTGGCGCACGCCTGTGATCCCAGCTACTCGGGATGCTGAGGCAGAAG
AATCGCTTGAGTCCGGGAGGCGGAGGGTGCAGTGAGCCAAGATCGAGCCATTGCACTCCAGCCTGGGCAA
CAAAAGCGAAACTCCACCTCAAAAAAAAAAAAAAAGTCTGCTCTGGCCGAGCATGGTGGCTCACGCCTGT
AAGCTCAACACTTTGGGAGGCCAAGGTGGGCAGATAACTTGAGGCCAGGAGTTCGAGACCAGCCTGGCCA
ACATGGTGAAACTCCATCTCTATTAAAAATATAAAATATGGCTGGGTGTGGTGGCTCACACCTGTAATCC
CAGCACTTTGGGAGGCCAAGGCGGGCAGATCACGAGGTCAGGAGATCGAGACCATCCTGGCTAACACGGT
GAAACCCCGTCTCTACTAAAAATACAAAACCTAGCCAGGCGTGGTGGCGGGCGCCTGTAGTCCCAGCTAC
TCGGGAGGCTGAGGCAGGAGAATGGCGTGAACCCGGGAGGCAGAGCTTGCAGTGAGCCGAGATCGCACCA
CTGCACTCCAGCCTGGGCAACAGAGCAAGACTCCGTCTAAAAGAAATATATATTATATAATTATATATAA
AATATGTATTTATATTATATAATTATATATAAAATATGTATTTATATTATATTATATAATATATAATAAA
TATATATCATATAAATATATTTTTATATATTATATATAAATATATATATATTTATATACATATATAATAT
ATATTTATATTATATATAAAATTATATATAGTATATATTATATAGTATAAATAAAATTATATATAGTATA
TATTATATTATATATAAAAGTATATATATTATATATTTCATATATTATATATTGTATATAATATAGTATA
TACAAAAAATATTAGCTGTGTGTTGTGGTGGGCGCCTGTAATCCCAGCTACGCGGGAGGCTGAGACAGGA
GAATCGCTTGAACCCAGGAGGTGGAGGCTGCAATGACCCAAGATGGCGCTACTGCAGTCCAGCCTGGGCT
ACAGAGTGAGACTCAAAAAAATAAAAAATACAGAAATTAGCCGGGTGTGGTGGCAGGCGCTTGTAATCCC
AGCTACTCCAGAGGGTGAGGGGTACGAGAATCGCTTGAACCCAGGAGGCACAGGTTGCAGTGAGCCATGA
TTGTACCACGGCACTCCAGCCTGGGCGACAGAGCAAGACTCTGCCTCAAAAAAAAAAAAAAAAAAAAAGT
CTGTTCACGGGGGTAGATGGATGGTGGTGGTTAGCAAGGGTAGAGTTGGGGTCATCCGGGGTAGATCCTT
GGGTCGAGTGTCAGCCTCACAGAGCACTGGGGCAGGGCAATGTTGTTGGATGTTCTTAGGAGACAGAAGT
GCAGAAGAAAGTAGTCCCAGCTACCTGGGAGGCTGGGGCAGGAAGATCGCTTGAGCTCAGGAGTTTAAGG
CTGCAATGAGCTATGATTGTGCCACTGCACTCCAGCCTGGGTGACCGACATAGCGAGACCCTGTCTTTAA
AAAAACAAAAAACTATGGGCCAGGCGCGGTGGCTGACGCTTGTAATTCCAACACTTTGGGAGGCCAAGGC
AGTGGATCACCTGAGGTTAGGAGTTCGAGACCAGCGTGGCCAACATGGTGAGACCCCCCCCCCCGCCACC
CCCATCTGTACTAAAAACACAAAAAATCAGCCCGGTGTGGTGGTGCATGCCTGTAATCCCAGCTACTAGG
GAGGCTGAGGCAGAAGAATCGTTTGAACCCGGGAGACAGAGGTTGCAGTGAGCCGCGATTGTGCCACTGC
ACTCCAGCCTGGGTGACAGAGGGAGATGCCCACTCAAAAAATAAAAATAAATAAAAATAAATAAAAATGC
ACAGGGGTAAGGGTAAATCAGAGCTGGTTAGCTGGTATTATCTAGGGGGCCTGGGAGCTCTTATGGGACA
AGATTGAAGCCAGTTCCATGTCGTGTCAGCACAGGGCTCTTGGTCAGAAGGTTTTGGGGCGATTGGCCCC
TTTAGGGGATACTCAGGAGGAGAAGCATGGTCTAGTGGGAGGTCAGATGTCAGCCAGGGTGGGCCGGAGT
ACTTCAGGGATAGAGGTACAACCTGGGAGGTGGACAAGAGGGAGAAGCTGGGCGTGACCCTGTAGGAGGG
GCTCTTATCCAGCTGGCGTCAGGGCAGGTCACTGGGACTGCTTAGGGGCAGGAGCACAGGTGAGGGGCAT
GCGGGAGGCGGTGTCACCCATGGTGAGGCACCAGGGCAGGCTCATGTCTGGAGGGCATCTTGGAAGTAAG
AGGGGTGGGCTGGGGGTGTGGGGGGCTGGGGAAAGGGCCACGTCGTGGGTCTAGAGGAGAGCCTGGTTAA
AGAGCTTCTGGGTGGGACATTAGGGGCAGGGCCGTGCGGGCAGCAGTTCAGCCGGCAGAGGGCACAGGCG
CGGGTATCTCAGGGTGGGAGCATGGCCTTGCAGGGCGGTGTCTGAGGGGCGGGAGCTGGATGTAAAACTA
TGCGGTCATTTTTCGGTGGGTGGAAAAATGGGAAGAACAGGCGTGGGCGTGGCCCAGCTCGGGGTCAGCT
GCTGTGGGCGCGGCCAAGCACAGGGTTGTAGGTCAAGTAACGGGGCAGGGGCGGGGCTAGCGTAGCGTGG
GAGGTGACAGGTGTGGGCACCCCGGTGTGGGCGTGGCCCGCAAATGCGGTGGGGACGGGGCCGTGGGCGG
GGCATCACAGTAGGTGTGGCCTGTCTCACGTTCCGCCCCTCCCCACGCAGCACGCTGAGCGCCGACGCGG
GTCCCGAGTGCTATGAGCTGCAGGTGTGCGTCAAGGACTACTGCTTCGCGCGCGAGGACCGCACGGTGGG
GCTGGCCGTGCTGCAGCTGCGTGAGCTGGCCCAGCGCGGGAGCGCCGCCTGCTGGCTGCCGCTCGGCCGC
CGCATCCACATGGACGACACGGGCCTCACGGTGCTGCGAATCCTCTCGCAGCGCAGCAACGACGAGGTGG
CCAAGGAGTTCGTGAAGCTCAAGTCGGACACGCGCTCCGCCGAGGAGGGCGGTGCCGCGCCTGCGCCTTA
GCGCGGGCGGTCGGCCGAGCGGCACTGCGCCTGCGCGGAGGGCGCTGGGCGGGGAGGGACGGGGCTTGCG
CCTTGGTGGGACCTCCCCAGGGGCGGGGCTCGGGGGGCTCCACGCCAAGGGTGGGCTGCGCCTACGCCCT
TGACTCAGCTTTCCCTTTTGGGGAATTAGGAATGGAGGATGCCCCGCCCTCTCGGGAGGCCACGCCCAAG
GGCGCGACGAAGGAAGGAGCCACATCCCCAACTTGAGGCCACGCCCCCAGCACCTAGGGGGCATTTTGAG
CTGGGATGGGGGAAACCTCGTCCCTATGGAGGAGGCCACATCCCGGGGCTCTGGTACCGGGAGGCACCAC
CTCATGTCCCCTGGAAAAGCCATAAGATGGGACCCAGACCCCTGGGACCCCAGACCAATTGCCAAGTATG
GAAATCTCAGCTCCCTCGAGGGGGGGCCCTGGGCAAGGGGTAGGGCTCTCTGGAGCGCCCCTCTAGGTGG
CCTGGGGACTGGAGGGACCAGGATGCTGGTTGGAGGGCCCCGGAATACCGGAGTCCCTTTAGATATTTGT
GCAAAAAATAAATGGGGGGAGGGGGGAGGATGGGATTTCAAAAGCACATGCGCCCTTGGGCGCCCAAACC
CTGGGGGCCGAGGGGACGGCTCTGGTTCCCCACGCTGCCCCTACTTCCCTTTGGGAGTTTGCCTCTCCCT
CTCCCCCAACAAACCCAGTCCTCATATCATAGAGTTCAACACACCCATTTGACAGATGGCAAAACTGAGG
CTTAAAGAGCTGCTTGAGACTTGGCCAAGGTTCCAGGTGCCATACCCTCTGTGCCCCTCCCTTAGGCCTG
TGTGCCCCATGGAAGGGTGGGCTGAGATCGGGATGACCTGACACAGCTCCCTATTGCTGCTAATTCCCCC
TCGGCCTCCTCCAAGGGGTGGGAATTCCAGGCCAAGACCCCTACTTCGCCTTTCCTTCTCCGGCTGCCAA
GCAGGACCTTTGCCCTCAGCCCTTTCTCCTGGGATCTCCATGGGGGATGCCATGAGGGCCTCCCACCACA
AAAGAGAATTTGGGATCCCCTGGTCCCAGGTTTCTCCATCCCTTCTTCCTTTTCCAGAATTTTCCAAATA
GGAAAGAACAGAAGGAGACCAGAAACTCTAGGGGGGAGAAAGAGAATGAGAGAAAGAGAATGAGAGAGAG
AGAAACACAAACACAGTGACACAGTGAGAGCTTAGTCTCCAAGAGCCTATTCATTGATTCAAACACCCAA
GCCACAGGATACCTCAGATGGCCCTCTTGCCAGCTGGAAGCTCTTTCTCCAATGAGCAAAGTTACAGTGA
CCTGGCTGGAGTTACCTGGTGCACATAGGACCTTAGGGGAAAGTTCAGCGTGGACTACACTTGCTCTGGG
ATCTGCTTTTCCACATGTGTGTATGGCACGCCTTTTTCTGCTGGATTGGGAAGGACAAGATTTTGCTGTG
CTAGGGAGAAATGAAAACGGGGTGAGCTGAGTAGCTGGGTTTCTGGAGGATAGAACATCAGATGGGGAGG
CTTTCCGAGGTGAAGAATGAGAGGGAACCACTTACTAGAGAGAAAAGAGCTCCAGGCCTGGGGAACAGCA
CGTGCGAAGGCCAGGAGAGAAGAACTGTTGAAACAACGAGAAGGGTGGCACGGCTGGAGCTGAGCCAGCA
AGGGGGATCGTGAGGAGCCTTGGGGTTGGGGAGATCTGCAGAAGCATCAGACCAGGCAGGGCCTCGTACG
CAGTCCTGAGGAGTTTTACTTTTATTCTAAGACAGTTGGGGAGCTCCAGGAGCTGTTTTAAGTTGGGGAG
AGACTGGATTCCAGCCTGCAAAAGCTGTTTTGTGAAGACTAAAACCAGTGAGGAGAGGTGGAGGTGCTTT
GGGGACACTGAAATGGATTCTTGGAAAGATTCTGAAGGCTGTGTTGAAAAGACACCTATAGCTGTGGGGA
CATGACTATAATCCCAGCATTTGGGGAGACCGAGGCTGGCAGATCACTTAAGGTCAGGAGTTTGAGACCA
GCCTGGCCAACATGGCGAAACCCCATCTCTGCTAAAAATACAAAAATTAGCTGGGTGCAGTGGTGCATGC
CTGTAGTCCCAGCTACTCAGGAGACTGAGGCGGGAGAATTGTTTGAACCCTGGAGGCAGAGGTTGTAGTG
AGTCGTGATCACACAACTGCACTCCAGCCTGGGCAACAGAACAATACTCCATTCCCTCCCCTCTACCCCA
CCAAAAAAAAAAAAAAATCCTGCCCTTAGATGAGCTCTAGGGCTGCTGAGTACAGTTGTCCCAGTTGCAC
AGTGCCCAAGGGTTTGGCATTGCTAAGAAGGCCACGTGCAAATCCTAGATATTGAGTGTTGTATGTTTGT
GACGTTGGTTTCCCGACATGTGAATGGCCCAAGTGTCTGGAAGAAGTGGCGCCACTTTCTAATTTGCTTG
GAGATGTTGCATGTCCCTTAAATTCAGACAGGTGCAGGTAACTGGAGGTTCTGAACCAAAGGTTAAAATG
CAAATTCTCATACAGGGTTGGGAAGTTGTAGCCAGGGATAAGCTTATGTGACTGTTATATGGACTGAGGA
GCAGATGTGAATTTCGAACCATGACATGGCTGAGGGTAGGGGTCGGGTGGATGGATGATTCAGGGTTGTA
ACCCATAGAGCCCAAAGGGGAAGTGATCTGTGACCTGGGGTGAGGGTGATCTGGAAGATTTTTGGATGGC
TGGAAAGAAATGGGGAAGTCGAGCTGCCTGAGAGAGCCAAGTTATTTCCCAAAAGATTCCTTAGGAGTCT
TTCTGTTCAAGACCTCCGTGTGTGTGTGTGTGTGTTTAGGGTTCCCCAGCAATGGCCCAGGCATGTGAAG
GAAACAAGCTTCTTCAGGGAATATTTGTTGAATGAGTTTTCCTGACTCCCAGGCTAGAACTGTTTTTGCA
ATTTCCACCCTCTTTTCTTTCCCCCAGAGAACTCCTATTCGTCCTTCAAAACCCATCACGGAAACCCCTC
TTGGAGAAAACCCTCCTTCCTTCCCCTCAGGACTTTCCCAGCCACCGTCTCTCCTCCAGTCCAGCCTGAT
GCCATGGGACTGGGGGTTTCTCTGTCCAGCTCTGTTTCTCCCAGACTGGGGTCTGAGGACTCTCAGGACC
CCCAACTTTACCTAGCACAGGCTGGGCACAAGTGGGTGACAGGGAGTCTACGCCTAGTGGAATTATGTAT
TGGGGCAGGGTCAGTGTGAGAATACACATCCGCATGCATGTCTGTCCATGTCTGTCCGTACCAACCTTCC
CCTTCCACACGGACCTGGGCACATAGGAGGTGTCTGAGCCTGACACATGGGACAGAGAGTGGACATGGCT
GAGACACGGACAGAGAAAAGACAAGGAGTCCAGGGGGCTGAAAGCCTTTTGAAATCAGGAAGTTCCTGTA
TTGGCAGAACAAAGCCCAGAGAGGAGCAGGGCTTTCCTCAACGCCACCCAGCAAGTGGACACAGAGCCCG
GCCTTGGATGACACCTCCAGGGTTCTGAACCCTGGACCTCGCTTTATGCAAGGAGCTGGCCCCACATTTC
CATGAATCGGGGAAACAGCACAAGAAGGTTGGCCTGTGGCAGGGCAAGGGTTAAAGGGGTGACATTGAGG
GATGCCTCAGAGTCAAAGTCCCCTGACCAAGAGGAATAGAGTAGAAAACACAGAGACAGAGGGTGAGATC
ACGCCCCGATGAGGACGGAGAGAGACAGAGATGGAGAGAGACATAGAGGTGGAAATATACAGAGAAAGAT
AAATGCAGAGACCAAGGCAGGGAGTGTCGGGGGAAGTAAAGAGGGTGTCCTGAAGAAAGAAGGATCTGTT
CACTCTTACCAGTCTGTCCTCGAATGATTTGCATAAAATGAGGAGGTGCCTGTCCACACCCCCAATTCCT
CTCTCAGGCCCCAGAGCCTGAGACCTCACCATGCCCCCATCAGAGATGCAAAAAACTAAACACCCAACTA
GAAATCCTTGGGACCTCTCTCGGCTGGGATCTCAGAGCCTTTCTGTCCCCTACCCCTACCCCATGTGCTG
TCGATTTTGCAGATGGGGACAACCTGGGGCCTCCCGGAACTCTGCCACCCTGGGGAAGTTGGGGGAGGGC
CTTAGTCCCGGATCACAACCCCGTCTGCTCCCCAGAATCCTTTCCTAAGAATCGTTGAGGACCAAAGTTG
TCTTTGCTGACACGTGTTGCTTTTCTCTTTGCCTTTTATTGTTTCAGAGAAAAATCAAGTTGACTGTGTC
AAGTAACACCCCACCCCTTACCCCCGTCCAGCCATAGTGGCTCTCTGGAGACACAGGTCACAGGCGGAGG
GTCCCCTGATCATCCCCAACCACACAGCCAGGGGGACTTGACCCCTGTCCACCCCTGTCTCGTGCTCCCT
CAGACCCCCACAAACCGGCCAAGCAGTCCGGGGAGGCTTCCCCTCCACACAACTCTTAGCATGTGATTGC
AGATGTGAAATCAAAACGTTGTTTGTTTTTTGTTTTGTTTTGATTCTACCCCGTCGGTCCAGTGTCTGCA
CAGACGCCTTCATTTCTCTGTAAATATGTGACTTGGAACAAATGTTTAACACAAACGAGAAGTGGTCATG
AATGCATGGTGTTGAGATGTTTTGCACTATTCTGACTTTTTGGTCTCTGTAAAAATATTTTATTAACAGC
AGACATTAAAAAAAGAAAAACCACACACAGCCTTGGACACGTGGTTGCCTCCTCCTTGCATTCCTTTATC
AGCAAAAAAACAAAAACAAAAACCTCACGTACGATTAGCACCTACTAGGTAGGCGCAGACTCAGTAGAAC
ACACTGCTTGCCCATGAACGCGGCTCATCCGCAACTGGAGTCATCCCCATTTTACAGAGAAGGAAACTGA
AGTACAGAGAGACAAGATCTTGCTCAGATCACATAGCCAGGAAGAGATGGAGCTGGGACTTGAACTCAGA
ACATTTGCAACCATTGCTTTTTTTTTTTTTTTTTGAGATGAAGTCTCTGTTGCCCAGGCTGGAATGCAGT
GGTGCAATCTCAGCTCACTGCAATCTCCACCTCCCAGATTCAAGCGATTCTCCTGCCTTAGCCTCCTGAG
TAGCTGGGATTACAGGCGCCCGCCACCTTGCCTGGCTAATTTTTGTATTTTTAGTAGAGATAGGATTTCA
CCATGTTGGCCAGGCTGGTCGCGAACCCCTGACCTCAGGTGATCCACTCCCTCGGCCTCCCAAAGTGCTG
GGATTACAGGCGTGAGCCACCGCACCCGGCCATCTGTTGCCCTTAAGGAAGTTAAGATACAAACACTAGG
AATACATGCCCTTAATTCAACCCACACCCCCATGCTTGTTTGGTTTTGTTGGGTTTTTTGGGATCTTCTT
GTTTGTTTGTTTTTGAGACAGGGTCTTGCTCTGTCACCCAGGATGGAGTTCAGTGTCACAATCTCAACTC
ACTGCATCCTCAACCTCCCAGGCTCAGGTGATCCTCCCACCTCAGCCTCCTGAGTAGTGTGCACCACCAC
ACCTGGCTAATTTGTGTATTTTTTGTAGTGATAGGATGTCGCCATGTTGCCCAGACTGCTCTCGAACTCC
TCACTTTGGGCAATCCTCTCTCCTCAGCCCTCCAAAGTGTTGGGATTACAGGCGTGAGCCACTGTGCCTG
GCCATGTCTGTTTTAAATGTAGCAGCTGGGGCCAGGCGCAGTGGCTCACGCCTGTAATCCCAGCACTTTA
GGAGGCCGAGGCGGGTGGATCACGAGGTCAGGAGATCGAGACCATCCTGGCTAACACGGTGAAACCCCGT
CTCTACTAAAAGTACCAAAAATTAGCCGGGCACGGTGGCAGGCACCTGTAGTTCCAGCTACTCGGGAGGC
TGAGGCAGGAGAATGGTGTGAACTGGGGAGGCGGAGCTTGCAGTGAGCCAAGATCACGCCACTGCATTCC
AGCCTGGGTGACGGAGCGAGACTCCATCTCAAAAAAAAAAAAAGAAAAAAAAGTAGCAGCTGGGAATCTC
ATTTCATAAACTCAGATGTGTGAGGAATGAAACTCCATTTTCCAACAGCTGAATTTAATTTCTGTTTTGA
GTCTCCATCCCACGAGGAAGCAGAAATGGAATCTCATTCAGCCCAGTTTCCTCGGTAAATTCCGAAATTC
CCCTCCTTATGTCTGGGGTTATTTCTACATTTGAGCGGACAGGACGGGAGCTGCGGGATCCACCACCAGG
AGTGGGTTCAGTGAGTGCTTTTGGTTGCAAGTAACAGACAGCAGGACTAAAAGTGGGGCCAGAAAGTGGC
TTACACCAGGAGTTATCCAGCACGCAGCAATCCCGCTCCTGGGGGACTTTTCTCCTTTGAGAAACTTGCA
CGTGGGGGTGTGGTATCTTCTCAAAGAATAGCATATAGCTGGGAAAAGGGGACAAACCGCAGCTGTCTGC
ATGATGTCTGCAGAGGCAGCCTGCAGGTCCTTGAGTGCCCCTGCTCATTAGCTGTTTCTGTACCCAAGTG
CATAGGCTACGCACTGTGACTGATGTGGATCTATTTGCCCCTCGCTACAAAAGGGTCTCAAGTCTTGTCC
TTCAGTGTGTGGGACCCATCGTGTTACCAATGGGGCTTGGGGACTGAGGCTCAAGACTGCTTGCTGGGAA
ATGTAACCCCTTTGTTCTGGACAGGTAGAAGGAGAGGAGAATGGTCATCCAGGCCTAATGTAAAGTTTCT
GCAACCC
(SEQ ID NO: 5064 (SOURCE NCBI Reference Sequence NG_052872.1)).

[0207] In various embodiments, a UNC13A transcript is a pre-mRNA UNC13A transcript. In various embodiments, a UNC13A pre-mRNA transcript comprises a sequence provided as SEQ ID NO: 5065. NCBI Reference Sequence NC_000019.10 Reference GRCh38.p 13 Primary Assembly is SEQ ID NO: 5065.

UNC13A Transcript with a Cryptic Exon

[0208] In some embodiments, an UNC13A AON targets a region of an UNC13A transcript comprising a cryptic exon sequence, the UNC13A mRNA transcript comprising the sequence provided as SEQ ID NO: 5206.

(SEQ ID NO: 5206)
TTCTGCCACCATGGGAGAGAAAGTGTCATGGAGAGTGCAAGGGGTCGCCG
GGGGTCAGAGGTCCCAGGGTCTGGGGCAGCTTACATCATCCATCTGCCTG
TTTATTCATTAATTCATTCATCTACTCTTTTATCCATCCACACACCCACC
CATCTAACTACCCCAAATTTCACCCATCCACTCTTCCAACCTTTCAGTAA
TTCAACCACACATCCATCCATCCATCCATTCATCCATCCCATACATTGAT
CCGCAACTTAATCCACCTACCCAATCATTCATTCTTTCATACAACCAACC
ATCCATCCACCCATCAATTTATCCAACCATCCATTTTTCGTCTGTCCACC
AGCCACTCACAACCATCCATCTAAATATTCAGAAATTATGAACCCAATTA
TCAATACTTGCAATAGTTCAACCACACATCCTTCCATTCATCCACCCACC
CATTCATCCATTTGTCCATCTGCCTATCATCCATCCATCCATCCATCCA
TCTACCTATCTACCCATCTGACTATCAACAAATTCACCTATCTACTCAAT
CTTCCTTCTAATAACTCAACCACACTTCCATCCATCCCATCCAATACAAC
TTAATCTGCTCATCCAACATTTCATCTATCCACCCAGTCAATCATCTATC
CAGCAATCTATCTATCCACTCATCAAGTTATCCATCCATCATTCATCTAT
ACTCATCCATCATCTAACAATTACCCCCAAATTCACCCATCCATACATCT
ATACTTTCAATAGTTCAATCATATATCCATCCATCTGTCCATCCATCCAT
CATCCATCTAGCCACGAATCTACCCACCAACTCATCCATCTATCCATCCA
TGTACTCACCCATCTCTCCATCCATCCTTTTATCTACTCATCACTCATTC
ATCTGTTCAATCATTCATTCATTCACCAGCATTTATTCAACAAACTAGTT
CCTGGGGATAAGAGTTCTTTCCAGGAAACCCAGGCAGCTGGAAGAGACAT
ACCCAGACACAAACGGCCCAATCCTGAGTGGTTAGGGCTGGAATAGAAGG
AAGAACCTGATGATGAGTAGTGAGAGTCAACCTGGAGGCCAAGGTGGGCT
TCCCAGAGGAGGTGACCCTGAATCTGGACTTTGATGGATAGGGAGGAGTT
TTCCAGGTAAAGGGAATGGCATGGCGGGCAGTCTCAGAGGGCCAGGAGAG
TGTGGATGGTGTGGCCAGAAAGAGGAAGAGCTGGGCAGGCAGGAATGGTG
AGTGGAAGTGGCATGGGAGGGGCCGAGCAATGACCCTCAC
where underlined = TDP-43 binding site.

[0209] In some embodiments, a cryptic exon sequence within the UNC13A mRNA transcript is provided as SEQ ID NO: 5207.

(SEQ ID NO: 5207)
CCATCTCTCCATCCATCCTTTTATCTACTCATCACTCATTCATCTGTTCA
ATCATTCATTCATTCACCAGCATTTATTCAACAAACTAGTTCCTGGGGAT
AAGAGTTCTTTCCAGGAAACCCAGGCAGCTGGAAGAGACATACCCAGACA
CAAACGGCCCAATCCTGAGTGGTTAGGG.

[0210] In some embodiments, a cryptic exon sequence within the UNC13A mRNA transcript is provided as SEQ ID NO: 5208.

(SEQ ID NO: 5208)
CCATCTCTCCATCCATCCTTTTATCTACTCATCACTCATTCATCTGTTCA
ATCATTCATTCATTCACCAGCATTTATTCAACAAACTAGTTCCTGGGGAT
AAGAGTTCTTTCCAGGAAACCCAGGCAG.

### UNC13A Oligonucleotides Targeting Regions of the UNC13A Transcript

[0211] In various embodiments, UNC13A AON disclosed herein are complementary to specific regions of UNC13A transcripts (for example, a UNC13A pre-mRNA) comprising a sequence that shares at least 90% (e.g., 90%, 91%, 92%, 93%, 94%, 95%, 96%, 97%, 98%, 99%, or 100%) identity to any one of SEQ ID NOs: 5057-5065 or SEQ ID NOs: 5206-5208. In some embodiments, a UNC13A AON comprises a sequence that is complementary to a specific region of the UNC13A transcript comprising a sequence that shares at least 90% (e.g., 90%, 91%, 92%, 93%, 94%, 95%, 96%, 97%, 98%, 99%, or 100%) identity to any one of SEQ ID NOs: 5057-5065 or SEQ ID NOs: 5206-5208. In some embodiments, a UNC13A AON comprises a sequence that is at least 85% complementary to a specific region of the UNC13A transcript. In some embodiments, a UNC13A AON comprises a sequence that is at least 86%, at least 87%, at least 88%, at least 89%, at least 90%, at least 91%, at least 92%, at least 93%, at least 94%, at least 95%, at least 96%, at least 97%, at least 98%, at least 99%, or at least 100% complementary to a specific region of the UNC13A transcript. In some embodiments, a UNC13A AON comprises a sequence that is 90 to 99% complementary to a specific region of the UNC13A transcript. In some embodiments, a UNC13A AON comprises a sequence that is 90 to 95% complementary to a specific region of the UNC13A transcript. In some embodiments, a UNC13A AON comprises a sequence that is 95 to 99% complementary to a specific region of the UNC13A transcript.

[0212] In some embodiments, the UNC13A AON (e.g., UNC13A AON) has a segment that has, at most, 7 linked nucleosides. In some embodiments, the UNC13A AON has a segment that has, at most, 6, 5, 4, 3, or 2 linked nucleosides. The segments of the UNC13A AON may be separated from other segments of the UNC13A AON through a spacer. The segment of the UNC13A AON is complementary to a specific region of the UNC13A transcript (for example, a UNC13A transcript) comprising a sequence that shares at least 90% (e.g., 90%, 91%, 92%, 93%, 94%, 95%, 96%, 97%, 98%, 99%, or 100%) identity to any one of SEQ ID NOs: 5057-5063 or an UNC13A pre-mRNA transcript transcribed from SEQ ID NO: 5064 or 5065 or SEQ ID NOs: 5206-5208.

### UNC13A Oligonucleotide Variants

[0213] In various embodiments, UNC13A AONs include different variants, hereafter referred to as UNC13A AON variants. A UNC13A AON variant may be an oligonucleotide sequence of 5 to 100 nucleobases in length, for example, 10 to 40 nucleobases in length, for example, 14 to 40 nucleobases in length, 10 to 30 nucleobases in length, for example, 14 to 30 nucleobases in length, for example, 16 to 28 nucleobases in length, for example, 19 to 23 nucleobases in length, for example, 21 to 23 nucleobases in length, for example, or 18, 19, 20, 21, 22, 23, 24, 25, 26, 27, 28, 29, or 30 nucleobases in length. A UNC13A AON variant may be an oligonucleotide sequence complementary to a portion of a UNC13A pre-mRNA sequence or a UNC13A gene sequence.

[0214] In various embodiments, a UNC13A AON variant represents a modified version of a corresponding UNC13A parent oligonucleotide that includes a nucleobase sequence selected from any one of SEQ ID NOs: 1-1264. In some embodiments, a UNC13A AON variant includes a nucleobase sequence that represents a shortened version of a nucleobase sequence of a UNC13A AON selected from any one of SEQ ID NOs: 1-1264. As one example, if a UNC13A parent oligonucleotide includes a 25mer (e.g., 25 oligonucleotide units in length) a variant (e.g., a UNC13A variant) may include a shorter version (e.g., 15mer, 16mer, 17mer, 18mer, 19mer, 20mer, 21mer, or 23mer) of the 25mer UNC13A parent oligonucleotide. In one embodiment, a nucleobase sequence of a UNC13A AON variant differs from a corresponding nucleobase sequence of a UNC13A parent oligonucleotide in that 1, 2, 3, 4, 5, or 6 oligonucleotide units are removed from one or both of the 3′ and 5′ ends of the nucleobase sequence of the UNC13A parent oligonucleotide. In one embodiment, the corresponding UNC13A AON variant may include a 23mer where two oligonucleotide units were removed from one of the 3′ or 5′ end of a 25mer included in the UNC13A parent oligonucleotide. In one embodiment, the corresponding UNC13A AON variant may include a 23mer where one nucleotide base is removed from each of the 3′ and 5′ ends of the 25mer included in the UNC13A parent oligonucleotide. In one embodiment, the corresponding UNC13A AON variant may include a 21mer where two oligonucleotide units are removed from each of the 3′ and 5′ ends of the 25mer included in the UNC13A parent oligonucleotide. In one embodiment, the corresponding UNC13A AON variant may include a 21mer where four oligonucleotide units are removed from either the 3′ or 5′ end of the 25mer included in the UNC13A parent oligonucleotide. In one embodiment, the corresponding UNC13A AON variant may include a 20mer where two oligonucleotide units are removed from the 3′ end of the 25mer included in the UNC13A parent oligonucleotide and three oligonucleotide units are removed from the 5′ end of the 25mer included in the UNC13A parent oligonucleotide. In one embodiment, the corresponding UNC13A AON variant may include a 20mer where three oligonucleotide units are removed from the 3′ end of the 25mer included in the UNC13A parent oligonucleotide and two oligonucleotide units are removed from the 5′ end of the 25mer included in the UNC13A parent oligonucleotide. In one embodiment, the corresponding UNC13A AON variant may include a 20mer where five oligonucleotide units are removed from either the 3′ or 5′ end of the 25mer included in the UNC13A parent oligonucleotide. In one embodiment, the corresponding UNC13A AON variant may include a 19mer where three oligonucleotide units are removed from each of the 3′ and 5′ ends of the 25mer included in the UNC13A parent oligonucleotide. In one embodiment, the corresponding UNC13A AON variant may include a 19mer where two oligonucleotide units are removed from the 3′ end of the 25mer included in the UNC13A parent oligonucleotide and four oligonucleotide units are removed from the 5′ end of the 25mer included in the UNC13A parent oligonucleotide. In one embodiment, the corresponding UNC13A AON variant may include a 19mer where four oligonucleotide units are removed from the 3′ end of the 25mer included in the UNC13A parent oligonucleotide and two oligonucleotide units are removed from the 5′ end of the 25mer included in the UNC13A parent oligonucleotide. In one embodiment, the corresponding UNC13A AON variant may include a 19mer where six oligonucleotide units are removed from either the 3′ or 5′ end of the 25mer included in the UNC13A parent oligonucleotide.

[0215] In one embodiment, the corresponding UNC13A AON variant may include a 18mer where two oligonucleotide units are removed from the 3′ end of the 25mer included in the UNC13A parent oligonucleotide and five oligonucleotide units are removed from the 5′ end of the 25mer included in the UNC13A parent oligonucleotide. In one embodiment, the corresponding UNC13A AON variant may include a 18mer where five oligonucleotide units are removed from the 3′ end of the 25mer included in the UNC13A parent oligonucleotide and two oligonucleotide units are removed from the 5′ end of the 25mer included in the UNC13A parent oligonucleotide. In one embodiment, the corresponding UNC13A AON variant may include a 18mer where one oligonucleotide unit is removed from the 3′ end of the 25mer included in the UNC13A parent oligonucleotide and six oligonucleotide units are removed from the 5′ end of the 25mer included in the UNC13A parent oligonucleotide. In one embodiment, the corresponding UNC13A AON variant may include a 18mer where six oligonucleotide units are removed from the 3′ end of the 25mer included in the UNC13A parent oligonucleotide and one oligonucleotide unit is removed from the 5′ end of the 25mer included in the UNC13A parent oligonucleotide. In one embodiment, the corresponding UNC13A AON variant may include a 18mer where seven oligonucleotide units are removed from either the 3′ or 5′ end of the 25mer included in the UNC13A parent oligonucleotide.

[0216] In one embodiment, the corresponding UNC13A AON variant may include a 17mer where two oligonucleotide units are removed from the 3′ end of the 25mer included in the UNC13A parent oligonucleotide and six oligonucleotide units are removed from the 5′ end of the 25mer included in the UNC13A parent oligonucleotide. In one embodiment, the corresponding UNC13A AON variant may include a 17mer where six oligonucleotide units are removed from the 3′ end of the 25mer included in the UNC13A parent oligonucleotide and two oligonucleotide units are removed from the 5′ end of the 25mer included in the UNC13A parent oligonucleotide. In one embodiment, the corresponding UNC13A AON variant may include a 17mer where eight oligonucleotide units are removed from either the 3′ or 5′ end of the 25mer included in the UNC13A parent oligonucleotide.

[0217] In one embodiment, the corresponding UNC13A AON variant may include a 16mer where two oligonucleotide units are removed from the 3′ end of the 25mer included in the UNC13A parent oligonucleotide and seven oligonucleotide units are removed from the 5′ end of the 25mer included in the UNC13A parent oligonucleotide. In one embodiment, the corresponding UNC13A AON variant may include a 16mer where seven oligonucleotide units are removed from the 3′ end of the 25mer included in the UNC13A parent oligonucleotide and two oligonucleotide units are removed from the 5′ end of the 25mer included in the UNC13A parent oligonucleotide. In one embodiment, the corresponding UNC13A AON variant may include a 16mer where nine oligonucleotide units are removed from either the 3′ or 5′ end of the 25mer included in the UNC13A parent oligonucleotide.

[0218] In one embodiment, the corresponding UNC13A AON variant may include a 15mer where two oligonucleotide units are removed from the 3′ end of the 25mer included in the UNC13A parent oligonucleotide and eight oligonucleotide units are removed from the 5′ end of the 25mer included in the UNC13A parent oligonucleotide. In one embodiment, the corresponding UNC13A AON variant may include a 15mer where eight oligonucleotide units are removed from the 3′ end of the 25mer included in the UNC13A parent oligonucleotide and two oligonucleotide units are removed from the 5′ end of the 25mer included in the UNC13A parent oligonucleotide. In one embodiment, the corresponding UNC13A AON variant may include a 15mer where ten oligonucleotide units are removed from either the 3′ or 5′ end of the 25mer included in the UNC13A parent oligonucleotide. Example sequences of UNC13A AON variants are shown below in Table 2A and Table 2B.

TABLE 2A
Example UNC13A Oligonucleotide Variant Sequences

| | AON Sequence* | | Target Sequence |
|---|---|---|---|
| SEQ ID NO: | (5′ → 3′) | SEQ ID NO: | (5′ → 3′) |
| 2529 | GGAGGGGCCGAGCAATGACCCTC | 3793 | GAGGGTCATTGCTCGGCCCCTCC |
| 2530 | GGGAGGGGCCGAGCAATGACCCT | 3794 | AGGGTCATTGCTCGGCCCCTCCC |
| 2531 | TGGGAGGGGCCGAGCAATGACCC | 3795 | GGGTCATTGCTCGGCCCCTCCCA |
| 2532 | ATGGGAGGGGCCGAGCAATGACC | 3796 | GGTCATTGCTCGGCCCCTCCCAT |
| 2533 | CATGGGAGGGGCCGAGCAATGAC | 3797 | GTCATTGCTCGGCCCCTCCCATG |
| 2534 | GCATGGGAGGGGCCGAGCAATGA | 3798 | TCATTGCTCGGCCCCTCCCATGC |
| 2535 | GGCATGGGAGGGGCCGAGCAATG | 3799 | CATTGCTCGGCCCCTCCCATGCC |
| 2536 | TGGCATGGGAGGGGCCGAGCAAT | 3800 | ATTGCTCGGCCCCTCCCATGCCA |
| 2537 | GTGGCATGGGAGGGGCCGAGCAA | 3801 | TTGCTCGGCCCCTCCCATGCCAC |
| 2538 | AGTGGCATGGGAGGGGCCGAGCA | 3802 | TGCTCGGCCCCTCCCATGCCACT |
| 2539 | AAGTGGCATGGGAGGGGCCGAGC | 3803 | GCTCGGCCCCTCCCATGCCACTT |
| 2540 | GAAGTGGCATGGGAGGGGCCGAG | 3804 | CTCGGCCCCTCCCATGCCACTTC |
| 2541 | GGAAGTGGCATGGGAGGGGCCGA | 3805 | TCGGCCCCTCCCATGCCACTTCC |
| 2542 | TGGAAGTGGCATGGGAGGGGCCG | 3806 | CGGCCCCTCCCATGCCACTTCCA |
| 2543 | GTGGAAGTGGCATGGGAGGGGCC | 3807 | GGCCCCTCCCATGCCACTTCCAC |
| 2544 | AGTGGAAGTGGCATGGGAGGGGC | 3808 | GCCCCTCCCATGCCACTTCCACT |
| 2545 | GAGTGGAAGTGGCATGGGAGGGG | 3809 | CCCCTCCCATGCCACTTCCACTC |
| 2546 | TGAGTGGAAGTGGCATGGGAGGG | 3810 | CCCTCCCATGCCACTTCCACTCA |
| 2547 | GTGAGTGGAAGTGGCATGGGAGG | 3811 | CCTCCCATGCCACTTCCACTCAC |
| 2548 | GGTGAGTGGAAGTGGCATGGGAG | 3812 | CTCCCATGCCACTTCCACTCACC |
| 2549 | TGGTGAGTGGAAGTGGCATGGGA | 3813 | TCCCATGCCACTTCCACTCACCA |
| 2551 | AATGGTGAGTGGAAGTGGCATGG | 3815 | CCATGCCACTTCCACTCACCATT |
| 2552 | GAATGGTGAGTGGAAGTGGCATG | 3816 | CATGCCACTTCCACTCACCATTC |
| 2553 | GGAATGGTGAGTGGAAGTGGCAT | 3817 | ATGCCACTTCCACTCACCATTCC |
| 2554 | AGGAATGGTGAGTGGAAGTGGCA | 3818 | TGCCACTTCCACTCACCATTCCT |
| 2555 | CAGGAATGGTGAGTGGAAGTGGC | 3819 | GCCACTTCCACTCACCATTCCTG |
| 2556 | GCAGGAATGGTGAGTGGAAGTGG | 3820 | CCACTTCCACTCACCATTCCTGC |
| 2557 | GGCAGGAATGGTGAGTGGAAGTG | 3821 | CACTTCCACTCACCATTCCTGCC |
| 2558 | AGGCAGGAATGGTGAGTGGAAGT | 3822 | ACTTCCACTCACCATTCCTGCCT |
| 2559 | CAGGCAGGAATGGTGAGTGGAAG | 3823 | CTTCCACTCACCATTCCTGCCTG |
| 2560 | GCAGGCAGGAATGGTGAGTGGAA | 3824 | TTCCACTCACCATTCCTGCCTGC |
| 2561 | GGCAGGCAGGAATGGTGAGTGGA | 3825 | TCCACTCACCATTCCTGCCTGCC |
| 2562 | GGGCAGGCAGGAATGGTGAGTGG | 3826 | CCACTCACCATTCCTGCCTGCCC |
| 2563 | TGGGCAGGCAGGAATGGTGAGTG | 3827 | CACTCACCATTCCTGCCTGCCCA |
| 2564 | CTGGGCAGGCAGGAATGGTGAGT | 3828 | ACTCACCATTCCTGCCTGCCCAG |
| 2565 | GCTGGGCAGGCAGGAATGGTGAG | 3829 | CTCACCATTCCTGCCTGCCCAGC |
| 2566 | AGCTGGGCAGGCAGGAATGGTGA | 3830 | TCACCATTCCTGCCTGCCCAGCT |
| 2567 | GAGCTGGGCAGGCAGGAATGGTG | 3831 | CACCATTCCTGCCTGCCCAGCTC |
| 2568 | AGAGCTGGGCAGGCAGGAATGGT | 3832 | ACCATTCCTGCCTGCCCAGCTCT |
| 2569 | AAGAGCTGGGCAGGCAGGAATGG | 3833 | CCATTCCTGCCTGCCCAGCTCTT |
| 2570 | GAAGAGCTGGGCAGGCAGGAATG | 3834 | CATTCCTGCCTGCCCAGCTCTTC |
| 2571 | GGAAGAGCTGGGCAGGCAGGAAT | 3835 | ATTCCTGCCTGCCCAGCTCTTCC |
| 2572 | AGGAAGAGCTGGGCAGGCAGGAA | 3836 | TTCCTGCCTGCCCAGCTCTTCCT |
| 2573 | GAGGAAGAGCTGGGCAGGCAGGA | 3837 | TCCTGCCTGCCCAGCTCTTCCTC |
| 2574 | AGAGGAAGAGCTGGGCAGGCAGG | 3838 | CCTGCCTGCCCAGCTCTTCCTCT |
| 2575 | AAGAGGAAGAGCTGGGCAGGCAG | 3839 | CTGCCTGCCCAGCTCTTCCTCTT |
| 2576 | AAAGAGGAAGAGCTGGGCAGGCA | 3840 | TGCCTGCCCAGCTCTTCCTCTTT |
| 2577 | GAAAGAGGAAGAGCTGGGCAGGC | 3841 | GCCTGCCCAGCTCTTCCTCTTTC |
| 2578 | AGAAAGAGGAAGAGCTGGGCAGG | 3842 | CCTGCCCAGCTCTTCCTCTTTCT |
| 2579 | CAGAAAGAGGAAGAGCTGGGCAG | 3843 | CTGCCCAGCTCTTCCTCTTTCTG |
| 2580 | CCAGAAAGAGGAAGAGCTGGGCA | 3844 | TGCCCAGCTCTTCCTCTTTCTGG |
| 2581 | GCCAGAAAGAGGAAGAGCTGGGC | 3845 | GCCCAGCTCTTCCTCTTTCTGGC |
| 2582 | GGCCAGAAAGAGGAAGAGCTGGG | 3846 | CCCAGCTCTTCCTCTTTCTGGCC |
| 2583 | TGGCCAGAAAGAGGAAGAGCTGG | 3847 | CCAGCTCTTCCTCTTTCTGGCCA |
| 2584 | GTGGCCAGAAAGAGGAAGAGCTG | 3848 | CAGCTCTTCCTCTTTCTGGCCAC |
| 2585 | TGTGGCCAGAAAGAGGAAGAGCT | 3849 | AGCTCTTCCTCTTTCTGGCCACA |
| 2586 | GTGTGGCCAGAAAGAGGAAGAGC | 3850 | GCTCTTCCTCTTTCTGGCCACAC |
| 2587 | GGTGTGGCCAGAAAGAGGAAGAG | 3851 | CTCTTCCTCTTTCTGGCCACACC |
| 2588 | TGGTGTGGCCAGAAAGAGGAAGA | 3852 | TCTTCCTCTTTCTGGCCACACCA |
| 2589 | ATGGTGTGGCCAGAAAGAGGAAG | 3853 | CTTCCTCTTTCTGGCCACACCAT |
| 2590 | GATGGTGTGGCCAGAAAGAGGAA | 3854 | TTCCTCTTTCTGGCCACACCATC |
| 2591 | GGATGGTGTGGCCAGAAAGAGGA | 3855 | TCCTCTTTCTGGCCACACCATCC |
| 2592 | TGGATGGTGTGGCCAGAAAGAGG | 3856 | CCTCTTTCTGGCCACACCATCCA |
| 2594 | TGTGGATGGTGTGGCCAGAAAGA | 3858 | TCTTTCTGGCCACACCATCCACA |
| 2595 | GTGTGGATGGTGTGGCCAGAAAG | 3859 | CTTTCTGGCCACACCATCCACAC |
| 2596 | AGTGTGGATGGTGTGGCCAGAAA | 3860 | TTTCTGGCCACACCATCCACACT |
| 2597 | GAGTGTGGATGGTGTGGCCAGAA | 3861 | TTCTGGCCACACCATCCACACTC |
| 2598 | AGAGTGTGGATGGTGTGGCCAGA | 3862 | TCTGGCCACACCATCCACACTCT |
| 2599 | GAGAGTGTGGATGGTGTGGCCAG | 3863 | CTGGCCACACCATCCACACTCTC |
| 2600 | GGAGAGTGTGGATGGTGTGGCCA | 3864 | TGGCCACACCATCCACACTCTCC |
| 2601 | AGGAGAGTGTGGATGGTGTGGCC | 3865 | GGCCACACCATCCACACTCTCCT |
| 2602 | CAGGAGAGTGTGGATGGTGTGGC | 3866 | GCCACACCATCCACACTCTCCTG |
| 2603 | CCAGGAGAGTGTGGATGGTGTGG | 3867 | CCACACCATCCACACTCTCCTGG |
| 2604 | GCCAGGAGAGTGTGGATGGTGTG | 3868 | CACACCATCCACACTCTCCTGGC |
| 2605 | GGCCAGGAGAGTGTGGATGGTGT | 3869 | ACACCATCCACACTCTCCTGGCC |
| 2606 | GGGCCAGGAGAGTGTGGATGGTG | 3870 | CACCATCCACACTCTCCTGGCCC |
| 2607 | AGGGCCAGGAGAGTGTGGATGGT | 3871 | ACCATCCACACTCTCCTGGCCCT |
| 2608 | GAGGGCCAGGAGAGTGTGGATGG | 3872 | CCATCCACACTCTCCTGGCCCTC |
| 2609 | AGAGGGCCAGGAGAGTGTGGATG | 3873 | CATCCACACTCTCCTGGCCCTCT |
| 2610 | CAGAGGGCCAGGAGAGTGTGGAT | 3874 | ATCCACACTCTCCTGGCCCTCTG |
| 2611 | TCAGAGGGCCAGGAGAGTGTGGA | 3875 | TCCACACTCTCCTGGCCCTCTGA |
| 2612 | CTCAGAGGGCCAGGAGAGTGTGG | 3876 | CCACACTCTCCTGGCCCTCTGAG |
| 2613 | TCTCAGAGGGCCAGGAGAGTGTG | 3877 | CACACTCTCCTGGCCCTCTGAGA |
| 2614 | GTCTCAGAGGGCCAGGAGAGTGT | 3878 | ACACTCTCCTGGCCCTCTGAGAC |
| 2615 | AGTCTCAGAGGGCCAGGAGAGTG | 3879 | CACTCTCCTGGCCCTCTGAGACT |
| 2616 | CAGTCTCAGAGGGCCAGGAGAGT | 3880 | ACTCTCCTGGCCCTCTGAGACTG |
| 2617 | GCAGTCTCAGAGGGCCAGGAGAG | 3881 | CTCTCCTGGCCCTCTGAGACTGC |
| 2618 | GGCAGTCTCAGAGGGCCAGGAGA | 3882 | TCTCCTGGCCCTCTGAGACTGCC |
| 2619 | GGGCAGTCTCAGAGGGCCAGGAG | 3883 | CTCCTGGCCCTCTGAGACTGCCC |
| 2620 | CGGGCAGTCTCAGAGGGCCAGGA | 3884 | TCCTGGCCCTCTGAGACTGCCCG |
| 2621 | GCGGGCAGTCTCAGAGGGCCAGG | 3885 | CCTGGCCCTCTGAGACTGCCCGC |
| 2622 | GGCGGGCAGTCTCAGAGGGCCAG | 3886 | CTGGCCCTCTGAGACTGCCCGCC |
| 2623 | TGGCGGGCAGTCTCAGAGGGCCA | 3887 | TGGCCCTCTGAGACTGCCCGCCA |
| 2624 | ATGGCGGGCAGTCTCAGAGGGCC | 3888 | GGCCCTCTGAGACTGCCCGCCAT |
| 2625 | CATGGCGGGCAGTCTCAGAGGGC | 3889 | GCCCTCTGAGACTGCCCGCCATG |
| 2626 | GCATGGCGGGCAGTCTCAGAGGG | 3890 | CCCTCTGAGACTGCCCGCCATGC |
| 2627 | GGCATGGCGGGCAGTCTCAGAGG | 3891 | CCTCTGAGACTGCCCGCCATGCC |
| 2628 | TGGCATGGCGGGCAGTCTCAGAG | 3892 | CTCTGAGACTGCCCGCCATGCCA |
| 2629 | ATGGCATGGCGGGCAGTCTCAGA | 3893 | TCTGAGACTGCCCGCCATGCCAT |
| 2630 | AATGGCATGGCGGGCAGTCTCAG | 3894 | CTGAGACTGCCCGCCATGCCATT |
| 2631 | GAATGGCATGGCGGGCAGTCTCA | 3895 | TGAGACTGCCCGCCATGCCATTC |
| 2632 | GGAATGGCATGGCGGGCAGTCTC | 3896 | GAGACTGCCCGCCATGCCATTCC |
| 2633 | GGGAATGGCATGGCGGGCAGTCT | 3897 | AGACTGCCCGCCATGCCATTCCC |
| 2634 | AGGGAATGGCATGGCGGGCAGTC | 3898 | GACTGCCCGCCATGCCATTCCCT |
| 2635 | AAGGGAATGGCATGGCGGGCAGT | 3899 | ACTGCCCGCCATGCCATTCCCTT |
| 2637 | TAAAGGGAATGGCATGGGGGCA | 3901 | TGCCCGCCATGCCATTCCCTTTA |
| 2638 | GTAAAGGGAATGGCATGGCGGGC | 3902 | GCCCGCCATGCCATTCCCTTTAC |
| 2639 | GGTAAAGGGAATGGCATGGCGGG | 3903 | CCCGCCATGCCATTCCCTTTACC |
| 2640 | AGGTAAAGGGAATGGCATGGCGG | 3904 | CCGCCATGCCATTCCCTTTACCT |
| 2641 | CAGGTAAAGGGAATGGCATGGCG | 3905 | CGCCATGCCATTCCCTTTACCTG |
| 2642 | CCAGGTAAAGGGAATGGCATGGC | 3906 | GCCATGCCATTCCCTTTACCTGG |
| 2643 | TCCAGGTAAAGGGAATGGCATGG | 3907 | CCATGCCATTCCCTTTACCTGGA |
| 2644 | TTCCAGGTAAAGGGAATGGCATG | 3908 | CATGCCATTCCCTTTACCTGGAA |
| 2645 | TTTCCAGGTAAAGGGAATGGCAT | 3909 | ATGCCATTCCCTTTACCTGGAAA |
| 2646 | TTTTCCAGGTAAAGGGAATGGCA | 3910 | TGCCATTCCCTTTACCTGGAAAA |
| 2647 | GTTTTCCAGGTAAAGGGAATGGC | 3911 | GCCATTCCCTTTACCTGGAAAAC |
| 2648 | AGTTTTCCAGGTAAAGGGAATGG | 3912 | CCATTCCCTTTACCTGGAAAACT |
| 2649 | GAGTTTTCCAGGTAAAGGGAATG | 3913 | CATTCCCTTTACCTGGAAAACTC |
| 2650 | GGAGTTTTCCAGGTAAAGGGAAT | 3914 | ATTCCCTTTACCTGGAAAACTCC |
| 2651 | AGGAGTTTTCCAGGTAAAGGGAA | 3915 | TTCCCTTTACCTGGAAAACTCCT |
| 2652 | GAGGAGTTTTCCAGGTAAAGGGA | 3916 | TCCCTTTACCTGGAAAACTCCTC |
| 2653 | GGAGGAGTTTTCCAGGTAAAGGG | 3917 | CCCTTTACCTGGAAAACTCCTCC |
| 2654 | GGGAGGAGTTTTCCAGGTAAAGG | 3918 | CCTTTACCTGGAAAACTCCTCCC |
| 2655 | AGGGAGGAGTTTTCCAGGTAAAG | 3919 | CTTTACCTGGAAAACTCCTCCCT |
| 2656 | TAGGGAGGAGTTTTCCAGGTAAA | 3920 | TTTACCTGGAAAACTCCTCCCTA |
| 2657 | ATAGGGAGGAGTTTTCCAGGTAA | 3921 | TTACCTGGAAAACTCCTCCCTAT |
| 2658 | GATAGGGAGGAGTTTTCCAGGTA | 3922 | TACCTGGAAAACTCCTCCCTATC |
| 2659 | GGATAGGGAGGAGTTTTCCAGGT | 3923 | ACCTGGAAAACTCCTCCCTATCC |
| 2660 | TGGATAGGGAGGAGTTTTCCAGG | 3924 | CCTGGAAAACTCCTCCCTATCCA |
| 2661 | ATGGATAGGGAGGAGTTTTCCAG | 3925 | CTGGAAAACTCCTCCCTATCCAT |
| 2662 | GATGGATAGGGAGGAGTTTTCCA | 3926 | TGGAAAACTCCTCCCTATCCATC |
| 2663 | TGATGGATAGGGAGGAGTTTTCC | 3927 | GGAAAACTCCTCCCTATCCATCA |
| 2664 | TTGATGGATAGGGAGGAGTTTTC | 3928 | GAAAACTCCTCCCTATCCATCAA |
| 2665 | TTTGATGGATAGGGAGGAGTTTT | 3929 | AAAACTCCTCCCTATCCATCAAA |
| 2666 | CTTTGATGGATAGGGAGGAGTTT | 3930 | AAACTCCTCCCTATCCATCAAAG |
| 2667 | ACTTTGATGGATAGGGAGGAGTT | 3931 | AACTCCTCCCTATCCATCAAAGT |
| 2668 | GACTTTGATGGATAGGGAGGAGT | 3932 | ACTCCTCCCTATCCATCAAAGTC |
| 2669 | GGACTTTGATGGATAGGGAGGAG | 3933 | CTCCTCCCTATCCATCAAAGTCC |
| 2670 | TGGACTTTGATGGATAGGGAGGA | 3934 | TCCTCCCTATCCATCAAAGTCCA |
| 2671 | CTGGACTTTGATGGATAGGGAGG | 3935 | CCTCCCTATCCATCAAAGTCCAG |
| 2672 | TCTGGACTTTGATGGATAGGGAG | 3936 | CTCCCTATCCATCAAAGTCCAGA |
| 2673 | ATCTGGACTTTGATGGATAGGGA | 3937 | TCCCTATCCATCAAAGTCCAGAT |
| 2674 | AATCTGGACTTTGATGGATAGGG | 3938 | CCCTATCCATCAAAGTCCAGATT |
| 2675 | GAATCTGGACTTTGATGGATAGG | 3939 | CCTATCCATCAAAGTCCAGATTC |
| 2676 | TGAATCTGGACTTTGATGGATAG | 3940 | CTATCCATCAAAGTCCAGATTCA |
| 2677 | CTGAATCTGGACTTTGATGGATA | 3941 | TATCCATCAAAGTCCAGATTCAG |
| 2678 | CCTGAATCTGGACTTTGATGGAT | 3942 | ATCCATCAAAGTCCAGATTCAGG |
| 2680 | ACCCTGAATCTGGACTTTGATGG | 3944 | CCATCAAAGTCCAGATTCAGGGT |
| 2681 | GACCCTGAATCTGGACTTTGATG | 3945 | CATCAAAGTCCAGATTCAGGGTC |
| 2682 | TGACCCTGAATCTGGACTTTGAT | 3946 | ATCAAAGTCCAGATTCAGGGTCA |
| 2683 | GTGACCCTGAATCTGGACTTTGA | 3947 | TCAAAGTCCAGATTCAGGGTCAC |
| 2684 | GGTGACCCTGAATCTGGACTTTG | 3948 | CAAAGTCCAGATTCAGGGTCACC |
| 2685 | AGGTGACCCTGAATCTGGACTTT | 3949 | AAAGTCCAGATTCAGGGTCACCT |
| 2686 | GAGGTGACCCTGAATCTGGACTT | 3950 | AAGTCCAGATTCAGGGTCACCTC |
| 2687 | GGAGGTGACCCTGAATCTGGACT | 3951 | AGTCCAGATTCAGGGTCACCTCC |
| 2688 | AGGAGGTGACCCTGAATCTGGAC | 3952 | GTCCAGATTCAGGGTCACCTCCT |
| 2689 | GAGGAGGTGACCCTGAATCTGGA | 3953 | TCCAGATTCAGGGTCACCTCCTC |
| 2690 | AGAGGAGGTGACCCTGAATCTGG | 3954 | CCAGATTCAGGGTCACCTCCTCT |
| 2691 | CAGAGGAGGTGACCCTGAATCTG | 3955 | CAGATTCAGGGTCACCTCCTCTG |
| 2692 | CCAGAGGAGGTGACCCTGAATCT | 3956 | AGATTCAGGGTCACCTCCTCTGG |
| 2693 | CCCAGAGGAGGTGACCCTGAATC | 3957 | GATTCAGGGTCACCTCCTCTGGG |
| 2694 | TCCCAGAGGAGGTGACCCTGAAT | 3958 | ATTCAGGGTCACCTCCTCTGGGA |
| 2695 | TTCCCAGAGGAGGTGACCCTGAA | 3959 | TTCAGGGTCACCTCCTCTGGGAA |
| 2696 | CTTCCCAGAGGAGGTGACCCTGA | 3960 | TCAGGGTCACCTCCTCTGGGAAG |
| 2697 | GCTTCCCAGAGGAGGTGACCCTG | 3961 | CAGGGTCACCTCCTCTGGGAAGC |
| 2698 | GGCTTCCCAGAGGAGGTGACCCT | 3962 | AGGGTCACCTCCTCTGGGAAGCC |
| 2699 | GGGCTTCCCAGAGGAGGTGACCC | 3963 | GGGTCACCTCCTCTGGGAAGCCC |
| 2700 | TGGGCTTCCCAGAGGAGGTGACC | 3964 | GGTCACCTCCTCTGGGAAGCCCA |
| 2701 | GTGGGCTTCCCAGAGGAGGTGAC | 3965 | GTCACCTCCTCTGGGAAGCCCAC |
| 2702 | GGTGGGCTTCCCAGAGGAGGTGA | 3966 | TCACCTCCTCTGGGAAGCCCACC |
| 2703 | AGGTGGGCTTCCCAGAGGAGGTG | 3967 | CACCTCCTCTGGGAAGCCCACCT |
| 2704 | AAGGTGGGCTTCCCAGAGGAGGT | 3968 | ACCTCCTCTGGGAAGCCCACCTT |
| 2705 | CAAGGTGGGCTTCCCAGAGGAGG | 3969 | CCTCCTCTGGGAAGCCCACCTTG |
| 2706 | CCAAGGTGGGCTTCCCAGAGGAG | 3970 | CTCCTCTGGGAAGCCCACCTTGG |
| 2707 | GCCAAGGTGGGCTTCCCAGAGGA | 3971 | TCCTCTGGGAAGCCCACCTTGGC |
| 2708 | GGCCAAGGTGGGCTTCCCAGAGG | 3972 | CCTCTGGGAAGCCCACCTTGGCC |
| 2709 | AGGCCAAGGTGGGCTTCCCAGAG | 3973 | CTCTGGGAAGCCCACCTTGGCCT |
| 2710 | GAGGCCAAGGTGGGCTTCCCAGA | 3974 | TCTGGGAAGCCCACCTTGGCCTC |
| 2711 | GGAGGCCAAGGTGGGCTTCCCAG | 3975 | CTGGGAAGCCCACCTTGGCCTCC |
| 2712 | TGGAGGCCAAGGTGGGCTTCCCA | 3976 | TGGGAAGCCCACCTTGGCCTCCA |
| 2713 | CTGGAGGCCAAGGTGGGCTTCCC | 3977 | GGGAAGCCCACCTTGGCCTCCAG |
| 2714 | CCTGGAGGCCAAGGTGGGCTTCC | 3978 | GGAAGCCCACCTTGGCCTCCAGG |
| 2715 | ACCTGGAGGCCAAGGTGGGCTTC | 3979 | GAAGCCCACCTTGGCCTCCAGGT |
| 2716 | AACCTGGAGGCCAAGGTGGGCTT | 3980 | AAGCCCACCTTGGCCTCCAGGTT |
| 2717 | CAACCTGGAGGCCAAGGTGGGCT | 3981 | AGCCCACCTTGGCCTCCAGGTTG |
| 2718 | TCAACCTGGAGGCCAAGGTGGGC | 3982 | GCCCACCTTGGCCTCCAGGTTGA |
| 2719 | GTCAACCTGGAGGCCAAGGTGGG | 3983 | CCCACCTTGGCCTCCAGGTTGAC |
| 2720 | AGTCAACCTGGAGGCCAAGGTGG | 3984 | CCACCTTGGCCTCCAGGTTGACT |
| 2721 | GAGTCAACCTGGAGGCCAAGGTG | 3985 | CACCTTGGCCTCCAGGTTGACTC |
| 2723 | GAGAGTCAACCTGGAGGCCAAGG | 3987 | CCTTGGCCTCCAGGTTGACTCTC |
| 2724 | TGAGAGTCAACCTGGAGGCCAAG | 3988 | CTTGGCCTCCAGGTTGACTCTCA |
| 2725 | GTGAGAGTCAACCTGGAGGCCAA | 3989 | TTGGCCTCCAGGTTGACTCTCAC |
| 2726 | AGTGAGAGTCAACCTGGAGGCCA | 3990 | TGGCCTCCAGGTTGACTCTCACT |
| 2727 | TAGTGAGAGTCAACCTGGAGGCC | 3991 | GGCCTCCAGGTTGACTCTCACTA |
| 2728 | GTAGTGAGAGTCAACCTGGAGGC | 3992 | GCCTCCAGGTTGACTCTCACTAC |
| 2729 | AGTAGTGAGAGTCAACCTGGAGG | 3993 | CCTCCAGGTTGACTCTCACTACT |
| 2730 | GAGTAGTGAGAGTCAACCTGGAG | 3994 | CTCCAGGTTGACTCTCACTACTC |
| 2731 | TGAGTAGTGAGAGTCAACCTGGA | 3995 | TCCAGGTTGACTCTCACTACTCA |
| 2732 | ATGAGTAGTGAGAGTCAACCTGG | 3996 | CCAGGTTGACTCTCACTACTCAT |
| 2733 | GATGAGTAGTGAGAGTCAACCTG | 3997 | CAGGTTGACTCTCACTACTCATC |
| 2734 | TGATGAGTAGTGAGAGTCAACCT | 3998 | AGGTTGACTCTCACTACTCATCA |
| 2735 | ATGATGAGTAGTGAGAGTCAACC | 3999 | GGTTGACTCTCACTACTCATCAT |
| 2736 | GATGATGAGTAGTGAGAGTCAAC | 4000 | GTTGACTCTCACTACTCATCATC |
| 2737 | TGATGATGAGTAGTGAGAGTCAA | 4001 | TTGACTCTCACTACTCATCATCA |
| 2738 | CTGATGATGAGTAGTGAGAGTCA | 4002 | TGACTCTCACTACTCATCATCAG |
| 2739 | CCTGATGATGAGTAGTGAGAGTC | 4003 | GACTCTCACTACTCATCATCAGG |
| 2740 | ACCTGATGATGAGTAGTGAGAGT | 4004 | ACTCTCACTACTCATCATCAGGT |
| 2741 | AACCTGATGATGAGTAGTGAGAG | 4005 | CTCTCACTACTCATCATCAGGTT |
| 2742 | GAACCTGATGATGAGTAGTGAGA | 4006 | TCTCACTACTCATCATCAGGTTC |
| 2743 | AGAACCTGATGATGAGTAGTGAG | 4007 | CTCACTACTCATCATCAGGTTCT |
| 2744 | AAGAACCTGATGATGAGTAGTGA | 4008 | TCACTACTCATCATCAGGTTCTT |
| 2745 | GAAGAACCTGATGATGAGTAGTG | 4009 | CACTACTCATCATCAGGTTCTTC |
| 2746 | GGAAGAACCTGATGATGAGTAGT | 4010 | ACTACTCATCATCAGGTTCTTCC |
| 2747 | AGGAAGAACCTGATGATGAGTAG | 4011 | CTACTCATCATCAGGTTCTTCCT |
| 2748 | AAGGAAGAACCTGATGATGAGTA | 4012 | TACTCATCATCAGGTTCTTCCTT |
| 2749 | GAAGGAAGAACCTGATGATGAGT | 4013 | ACTCATCATCAGGTTCTTCCTTC |
| 2750 | AGAAGGAAGAACCTGATGATGAG | 4014 | CTCATCATCAGGTTCTTCCTTCT |
| 2751 | TAGAAGGAAGAACCTGATGATGA | 4015 | TCATCATCAGGTTCTTCCTTCTA |
| 2752 | ATAGAAGGAAGAACCTGATGATG | 4016 | CATCATCAGGTTCTTCCTTCTAT |
| 2753 | AATAGAAGGAAGAACCTGATGAT | 4017 | ATCATCAGGTTCTTCCTTCTATT |
| 2754 | GAATAGAAGGAAGAACCTGATGA | 4018 | TCATCAGGTTCTTCCTTCTATTC |
| 2755 | GGAATAGAAGGAAGAACCTGATG | 4019 | CATCAGGTTCTTCCTTCTATTCC |
| 2756 | TGGAATAGAAGGAAGAACCTGAT | 4020 | ATCAGGTTCTTCCTTCTATTCCA |
| 2757 | CTGGAATAGAAGGAAGAACCTGA | 4021 | TCAGGTTCTTCCTTCTATTCCAG |
| 2758 | GCTGGAATAGAAGGAAGAACCTG | 4022 | CAGGTTCTTCCTTCTATTCCAGC |
| 2759 | GGCTGGAATAGAAGGAAGAACCT | 4023 | AGGTTCTTCCTTCTATTCCAGCC |
| 2760 | GGGCTGGAATAGAAGGAAGAACC | 4024 | GGTTCTTCCTTCTATTCCAGCCC |
| 2761 | AGGGCTGGAATAGAAGGAAGAAC | 4025 | GTTCTTCCTTCTATTCCAGCCCT |
| 2762 | TAGGGCTGGAATAGAAGGAAGAA | 4026 | TTCTTCCTTCTATTCCAGCCCTA |
| 2763 | TTAGGGCTGGAATAGAAGGAAGA | 4027 | TCTTCCTTCTATTCCAGCCCTAA |
| 2764 | GTTAGGGCTGGAATAGAAGGAAG | 4028 | CTTCCTTCTATTCCAGCCCTAAC |
| 2766 | TGGTTAGGGCTGGAATAGAAGGA | 4030 | TCCTTCTATTCCAGCCCTAACCA |
| 2767 | GTGGTTAGGGCTGGAATAGAAGG | 4031 | CCTTCTATTCCAGCCCTAACCAC |
| 2768 | AGTGGTTAGGGCTGGAATAGAAG | 4032 | CTTCTATTCCAGCCCTAACCACT |
| 2769 | GAGTGGTTAGGGCTGGAATAGAA | 4033 | TTCTATTCCAGCCCTAACCACTC |
| 2770 | TGAGTGGTTAGGGCTGGAATAGA | 4034 | TCTATTCCAGCCCTAACCACTCA |
| 2771 | CTGAGTGGTTAGGGCTGGAATAG | 4035 | CTATTCCAGCCCTAACCACTCAG |
| 2772 | CCTGAGTGGTTAGGGCTGGAATA | 4036 | TATTCCAGCCCTAACCACTCAGG |
| 2773 | TCCTGAGTGGTTAGGGCTGGAAT | 4037 | ATTCCAGCCCTAACCACTCAGGA |
| 2774 | ATCCTGAGTGGTTAGGGCTGGAA | 4038 | TTCCAGCCCTAACCACTCAGGAT |
| 2775 | AATCCTGAGTGGTTAGGGCTGGA | 4039 | TCCAGCCCTAACCACTCAGGATT |
| 2776 | CAATCCTGAGTGGTTAGGGCTGG | 4040 | CCAGCCCTAACCACTCAGGATTG |
| 2777 | CCAATCCTGAGTGGTTAGGGCTG | 4041 | CAGCCCTAACCACTCAGGATTGG |
| 2778 | CCCAATCCTGAGTGGTTAGGGCT | 4042 | AGCCCTAACCACTCAGGATTGGG |
| 2779 | GCCCAATCCTGAGTGGTTAGGGC | 4043 | GCCCTAACCACTCAGGATTGGGC |
| 2780 | GGCCCAATCCTGAGTGGTTAGGG | 4044 | CCCTAACCACTCAGGATTGGGCC |
| 2781 | CGGCCCAATCCTGAGTGGTTAGG | 4045 | CCTAACCACTCAGGATTGGGCCG |
| 2782 | ACGGCCCAATCCTGAGTGGTTAG | 4046 | CTAACCACTCAGGATTGGGCCGT |
| 2783 | AACGGCCCAATCCTGAGTGGTTA | 4047 | TAACCACTCAGGATTGGGCCGTT |
| 2784 | AAACGGCCCAATCCTGAGTGGTT | 4048 | AACCACTCAGGATTGGGCCGTTT |
| 2785 | CAAACGGCCCAATCCTGAGTGGT | 4049 | ACCACTCAGGATTGGGCCGTTTG |
| 2786 | ACAAACGGCCCAATCCTGAGTGG | 4050 | CCACTCAGGATTGGGCCGTTTGT |
| 2787 | CACAAACGGCCCAATCCTGAGTG | 4051 | CACTCAGGATTGGGCCGTTTGTG |
| 2788 | ACACAAACGGCCCAATCCTGAGT | 4052 | ACTCAGGATTGGGCCGTTTGTGT |
| 2789 | GACACAAACGGCCCAATCCTGAG | 4053 | CTCAGGATTGGGCCGTTTGTGTC |
| 2790 | AGACACAAACGGCCCAATCCTGA | 4054 | TCAGGATTGGGCCGTTTGTGTCT |
| 2791 | CAGACACAAACGGCCCAATCCTG | 4055 | CAGGATTGGGCCGTTTGTGTCTG |
| 2792 | CCAGACACAAACGGCCCAATCCT | 4056 | AGGATTGGGCCGTTTGTGTCTGG |
| 2793 | CCCAGACACAAACGGCCCAATCC | 4057 | GGATTGGGCCGTTTGTGTCTGGG |
| 2794 | ACCCAGACACAAACGGCCCAATC | 4058 | GATTGGGCCGTTTGTGTCTGGGT |
| 2795 | TACCCAGACACAAACGGCCCAAT | 4059 | ATTGGGCCGTTTGTGTCTGGGTA |
| 2796 | ATACCCAGACACAAACGGCCCAA | 4060 | TTGGGCCGTTTGTGTCTGGGTAT |
| 2797 | CATACCCAGACACAAACGGCCCA | 4061 | TGGGCCGTTTGTGTCTGGGTATG |
| 2798 | ACATACCCAGACACAAACGGCCC | 4062 | GGGCCGTTTGTGTCTGGGTATGT |
| 2799 | GACATACCCAGACACAAACGGCC | 4063 | GGCCGTTTGTGTCTGGGTATGTC |
| 2800 | AGACATACCCAGACACAAACGGC | 4064 | GCCGTTTGTGTCTGGGTATGTCT |
| 2801 | GAGACATACCCAGACACAAACGG | 4065 | CCGTTTGTGTCTGGGTATGTCTC |
| 2802 | AGAGACATACCCAGACACAAACG | 4066 | CGTTTGTGTCTGGGTATGTCTCT |
| 2803 | AAGAGACATACCCAGACACAAAC | 4067 | GTTTGTGTCTGGGTATGTCTCTT |
| 2804 | GAAGAGACATACCCAGACACAAA | 4068 | TTTGTGTCTGGGTATGTCTCTTC |
| 2805 | GGAAGAGACATACCCAGACACAA | 4069 | TTGTGTCTGGGTATGTCTCTTCC |
| 2806 | TGGAAGAGACATACCCAGACACA | 4070 | TGTGTCTGGGTATGTCTCTTCCA |
| 2807 | CTGGAAGAGACATACCCAGACAC | 4071 | GTGTCTGGGTATGTCTCTTCCAG |
| 2809 | AGCTGGAAGAGACATACCCAGAC | 4073 | GTCTGGGTATGTCTCTTCCAGCT |
| 2810 | CAGCTGGAAGAGACATACCCAGA | 4074 | TCTGGGTATGTCTCTTCCAGCTG |
| 2811 | GCAGCTGGAAGAGACATACCCAG | 4075 | CTGGGTATGTCTCTTCCAGCTGC |
| 2812 | GGCAGCTGGAAGAGACATACCCA | 4076 | TGGGTATGTCTCTTCCAGCTGCC |
| 2813 | AGGCAGCTGGAAGAGACATACCC | 4077 | GGGTATGTCTCTTCCAGCTGCCT |
| 2814 | CAGGCAGCTGGAAGAGACATACC | 4078 | GGTATGTCTCTTCCAGCTGCCTG |
| 2815 | CCAGGCAGCTGGAAGAGACATAC | 4079 | GTATGTCTCTTCCAGCTGCCTGG |
| 2816 | CCCAGGCAGCTGGAAGAGACATA | 4080 | TATGTCTCTTCCAGCTGCCTGGG |
| 2817 | ACCCAGGCAGCTGGAAGAGACAT | 4081 | ATGTCTCTTCCAGCTGCCTGGGT |
| 2818 | AACCCAGGCAGCTGGAAGAGACA | 4082 | TGTCTCTTCCAGCTGCCTGGGTT |
| 2819 | AAACCCAGGCAGCTGGAAGAGAC | 4083 | GTCTCTTCCAGCTGCCTGGGTTT |
| 2820 | GAAACCCAGGCAGCTGGAAGAGA | 4084 | TCTCTTCCAGCTGCCTGGGTTTC |
| 2821 | GGAAACCCAGGCAGCTGGAAGAG | 4085 | CTCTTCCAGCTGCCTGGGTTTCC |
| 2822 | AGGAAACCCAGGCAGCTGGAAGA | 4086 | TCTTCCAGCTGCCTGGGTTTCCT |
| 2823 | CAGGAAACCCAGGCAGCTGGAAG | 4087 | CTTCCAGCTGCCTGGGTTTCCTG |
| 2824 | CCAGGAAACCCAGGCAGCTGGAA | 4088 | TTCCAGCTGCCTGGGTTTCCTGG |
| 2825 | TCCAGGAAACCCAGGCAGCTGGA | 4089 | TCCAGCTGCCTGGGTTTCCTGGA |
| 2826 | TTCCAGGAAACCCAGGCAGCTGG | 4090 | CCAGCTGCCTGGGTTTCCTGGAA |
| 2827 | TTTCCAGGAAACCCAGGCAGCTG | 4091 | CAGCTGCCTGGGTTTCCTGGAAA |
| 2828 | CTTTCCAGGAAACCCAGGCAGCT | 4092 | AGCTGCCTGGGTTTCCTGGAAAG |
| 2829 | TCTTTCCAGGAAACCCAGGCAGC | 4093 | GCTGCCTGGGTTTCCTGGAAAGA |
| 2830 | TTCTTTCCAGGAAACCCAGGCAG | 4094 | CTGCCTGGGTTTCCTGGAAAGAA |
| 2831 | GTTCTTTCCAGGAAACCCAGGCA | 4095 | TGCCTGGGTTTCCTGGAAAGAAC |
| 2832 | AGTTCTTTCCAGGAAACCCAGGC | 4096 | GCCTGGGTTTCCTGGAAAGAACT |
| 2833 | GAGTTCTTTCCAGGAAACCCAGG | 4097 | CCTGGGTTTCCTGGAAAGAACTC |
| 2834 | AGAGTTCTTTCCAGGAAACCCAG | 4098 | CTGGGTTTCCTGGAAAGAACTCT |
| 2835 | AAGAGTTCTTTCCAGGAAACCCA | 4099 | TGGGTTTCCTGGAAAGAACTCTT |
| 2836 | TAAGAGTTCTTTCCAGGAAACCC | 4100 | GGGTTTCCTGGAAAGAACTCTTA |
| 2837 | ATAAGAGTTCTTTCCAGGAAACC | 4101 | GGTTTCCTGGAAAGAACTCTTAT |
| 2838 | GATAAGAGTTCTTTCCAGGAAAC | 4102 | GTTTCCTGGAAAGAACTCTTATC |
| 2839 | GGATAAGAGTTCTTTCCAGGAAA | 4103 | TTTCCTGGAAAGAACTCTTATCC |
| 2840 | GGGATAAGAGTTCTTTCCAGGAA | 4104 | TTCCTGGAAAGAACTCTTATCCC |
| 2841 | GGGGATAAGAGTTCTTTCCAGGA | 4105 | TCCTGGAAAGAACTCTTATCCCC |
| 2842 | TGGGGATAAGAGTTCTTTCCAGG | 4106 | CCTGGAAAGAACTCTTATCCCCA |
| 2843 | CTGGGGATAAGAGTTCTTTCCAG | 4107 | CTGGAAAGAACTCTTATCCCCAG |
| 2844 | CCTGGGGATAAGAGTTCTTTCCA | 4108 | TGGAAAGAACTCTTATCCCCAGG |
| 2845 | TCCTGGGGATAAGAGTTCTTTCC | 4109 | GGAAAGAACTCTTATCCCCAGGA |
| 2846 | TTCCTGGGGATAAGAGTTCTTTC | 4110 | GAAAGAACTCTTATCCCCAGGAA |
| 2847 | GTTCCTGGGGATAAGAGTTCTTT | 4111 | AAAGAACTCTTATCCCCAGGAAC |
| 2848 | AGTTCCTGGGGATAAGAGTTCTT | 4112 | AAGAACTCTTATCCCCAGGAACT |
| 2849 | TAGTTCCTGGGGATAAGAGTTCT | 4113 | AGAACTCTTATCCCCAGGAACTA |
| 2850 | CTAGTTCCTGGGGATAAGAGTTC | 4114 | GAACTCTTATCCCCAGGAACTAG |
| 2852 | AACTAGTTCCTGGGGATAAGAGT | 4116 | ACTCTTATCCCCAGGAACTAGTT |
| 2853 | AAACTAGTTCCTGGGGATAAGAG | 4117 | CTCTTATCCCCAGGAACTAGTTT |
| 2854 | CAAACTAGTTCCTGGGGATAAGA | 4118 | TCTTATCCCCAGGAACTAGTTTG |
| 2855 | ACAAACTAGTTCCTGGGGATAAG | 4119 | CTTATCCCCAGGAACTAGTTTGT |
| 2856 | AACAAACTAGTTCCTGGGGATAA | 4120 | TTATCCCCAGGAACTAGTTTGTT |
| 2857 | CAACAAACTAGTTCCTGGGGATA | 4121 | TATCCCCAGGAACTAGTTTGTTG |
| 2858 | TCAACAAACTAGTTCCTGGGGAT | 4122 | ATCCCCAGGAACTAGTTTGTTGA |
| 2859 | TTCAACAAACTAGTTCCTGGGGA | 4123 | TCCCCAGGAACTAGTTTGTTGAA |
| 2860 | ATTCAACAAACTAGTTCCTGGGG | 4124 | CCCCAGGAACTAGTTTGTTGAAT |
| 2861 | TATTCAACAAACTAGTTCCTGGG | 4125 | CCCAGGAACTAGTTTGTTGAATA |
| 2862 | TTATTCAACAAACTAGTTCCTGG | 4126 | CCAGGAACTAGTTTGTTGAATAA |
| 2863 | TTTATTCAACAAACTAGTTCCTG | 4127 | CAGGAACTAGTTTGTTGAATAAA |
| 2864 | ATTTATTCAACAAACTAGTTCCT | 4128 | AGGAACTAGTTTGTTGAATAAAT |
| 2865 | CATTTATTCAACAAACTAGTTCC | 4129 | GGAACTAGTTTGTTGAATAAATG |
| 2866 | GCATTTATTCAACAAACTAGTTC | 4130 | GAACTAGTTTGTTGAATAAATGC |
| 2867 | AGCATTTATTCAACAAACTAGTT | 4131 | AACTAGTTTGTTGAATAAATGCT |
| 2868 | CAGCATTTATTCAACAAACTAGT | 4132 | ACTAGTTTGTTGAATAAATGCTG |
| 2869 | CCAGCATTTATTCAACAAACTAG | 4133 | CTAGTTTGTTGAATAAATGCTGG |
| 2870 | ACCAGCATTTATTCAACAAACTA | 4134 | TAGTTTGTTGAATAAATGCTGGT |
| 2871 | CACCAGCATTTATTCAACAAACT | 4135 | AGTTTGTTGAATAAATGCTGGTG |
| 2872 | TCACCAGCATTTATTCAACAAAC | 4136 | GTTTGTTGAATAAATGCTGGTGA |
| 2873 | TTCACCAGCATTTATTCAACAAA | 4137 | TTTGTTGAATAAATGCTGGTGAA |
| 2874 | ATTCACCAGCATTTATTCAACAA | 4138 | TTGTTGAATAAATGCTGGTGAAT |
| 2875 | CATTCACCAGCATTTATTCAACA | 4139 | TGTTGAATAAATGCTGGTGAATG |
| 2876 | TCATTCACCAGCATTTATTCAAC | 4140 | GTTGAATAAATGCTGGTGAATGA |
| 2877 | TTCATTCACCAGCATTTATTCAA | 4141 | TTGAATAAATGCTGGTGAATGAA |
| 2878 | ATTCATTCACCAGCATTTATTCA | 4142 | TGAATAAATGCTGGTGAATGAAT |
| 2879 | CATTCATTCACCAGCATTTATTC | 4143 | GAATAAATGCTGGTGAATGAATG |
| 2880 | TCATTCATTCACCAGCATTTATT | 4144 | AATAAATGCTGGTGAATGAATGA |
| 2881 | TTCATTCATTCACCAGCATTTAT | 4145 | ATAAATGCTGGTGAATGAATGAA |
| 2882 | ATTCATTCATTCACCAGCATTTA | 4146 | TAAATGCTGGTGAATGAATGAAT |
| 2883 | CATTCATTCATTCACCAGCATTT | 4147 | AAATGCTGGTGAATGAATGAATG |
| 2884 | TCATTCATTCATTCACCAGCATT | 4148 | AATGCTGGTGAATGAATGAATGA |
| 2885 | ATCATTCATTCATTCACCAGCAT | 4149 | ATGCTGGTGAATGAATGAATGAT |
| 2886 | AATCATTCATTCATTCACCAGCA | 4150 | TGCTGGTGAATGAATGAATGATT |
| 2887 | CAATCATTCATTCATTCACCAGC | 4151 | GCTGGTGAATGAATGAATGATTG |
| 2888 | TCAATCATTCATTCATTCACCAG | 4152 | CTGGTGAATGAATGAATGATTGA |
| 2889 | TTCAATCATTCATTCATTCACCA | 4153 | TGGTGAATGAATGAATGATTGAA |
| 2890 | GTTCAATCATTCATTCATTCACC | 4154 | GGTGAATGAATGAATGATTGAAC |
| 2891 | TGTTCAATCATTCATTCATTCAC | 4155 | GTGAATGAATGAATGATTGAACA |
| 2892 | CTGTTCAATCATTCATTCATTCA | 4156 | TGAATGAATGAATGATTGAACAG |
| 2893 | TCTGTTCAATCATTCATTCATTC | 4157 | GAATGAATGAATGATTGAACAGA |
| 2895 | CATCTGTTCAATCATTCATTCAT | 4159 | ATGAATGAATGATTGAACAGATG |
| 2896 | TCATCTGTTCAATCATTCATTCA | 4160 | TGAATGAATGATTGAACAGATGA |
| 2897 | TTCATCTGTTCAATCATTCATTC | 4161 | GAATGAATGATTGAACAGATGAA |
| 2898 | ATTCATCTGTTCAATCATTCATT | 4162 | AATGAATGATTGAACAGATGAAT |
| 2899 | CATTCATCTGTTCAATCATTCAT | 4163 | ATGAATGATTGAACAGATGAATG |
| 2900 | TCATTCATCTGTTCAATCATTCA | 4164 | TGAATGATTGAACAGATGAATGA |
| 2901 | CTCATTCATCTGTTCAATCATTC | 4165 | GAATGATTGAACAGATGAATGAG |
| 2902 | ACTCATTCATCTGTTCAATCATT | 4166 | AATGATTGAACAGATGAATGAGT |
| 2903 | CACTCATTCATCTGTTCAATCAT | 4167 | ATGATTGAACAGATGAATGAGTG |
| 2904 | TCACTCATTCATCTGTTCAATCA | 4168 | TGATTGAACAGATGAATGAGTGA |
| 2905 | ATCACTCATTCATCTGTTCAATC | 4169 | GATTGAACAGATGAATGAGTGAT |
| 2906 | CATCACTCATTCATCTGTTCAAT | 4170 | ATTGAACAGATGAATGAGTGATG |
| 2907 | TCATCACTCATTCATCTGTTCAA | 4171 | TTGAACAGATGAATGAGTGATGA |
| 2908 | CTCATCACTCATTCATCTGTTCA | 4172 | TGAACAGATGAATGAGTGATGAG |
| 2909 | ACTCATCACTCATTCATCTGTTC | 4173 | GAACAGATGAATGAGTGATGAGT |
| 2910 | TACTCATCACTCATTCATCTGTT | 4174 | AACAGATGAATGAGTGATGAGTA |
| 2911 | CTACTCATCACTCATTCATCTGT | 4175 | ACAGATGAATGAGTGATGAGTAG |
| 2912 | TCTACTCATCACTCATTCATCTG | 4176 | CAGATGAATGAGTGATGAGTAGA |
| 2913 | ATCTACTCATCACTCATTCATCT | 4177 | AGATGAATGAGTGATGAGTAGAT |
| 2914 | TATCTACTCATCACTCATTCATC | 4178 | GATGAATGAGTGATGAGTAGATA |
| 2915 | TTATCTACTCATCACTCATTCAT | 4179 | ATGAATGAGTGATGAGTAGATAA |
| 2916 | TTTATCTACTCATCACTCATTCA | 4180 | TGAATGAGTGATGAGTAGATAAA |
| 2917 | TTTTATCTACTCATCACTCATTC | 4181 | GAATGAGTGATGAGTAGATAAAA |
| 2918 | CTTTTATCTACTCATCACTCATT | 4182 | AATGAGTGATGAGTAGATAAAAG |
| 2919 | CCTTTTATCTACTCATCACTCAT | 4183 | ATGAGTGATGAGTAGATAAAAGG |
| 2920 | TCCTTTTATCTACTCATCACTCA | 4184 | TGAGTGATGAGTAGATAAAAGGA |
| 2921 | ATCCTTTTATCTACTCATCACTC | 4185 | GAGTGATGAGTAGATAAAAGGAT |
| 2922 | CATCCTTTTATCTACTCATCACT | 4186 | AGTGATGAGTAGATAAAAGGATG |
| 2923 | CCATCCTTTTATCTACTCATCAC | 4187 | GTGATGAGTAGATAAAAGGATGG |
| 2924 | TCCATCCTTTTATCTACTCATCA | 4188 | TGATGAGTAGATAAAAGGATGGA |
| 2925 | ATCCATCCTTTTATCTACTCATC | 4189 | GATGAGTAGATAAAAGGATGGAT |
| 2926 | CATCCATCCTTTTATCTACTCAT | 4190 | ATGAGTAGATAAAAGGATGGATG |
| 2927 | CCATCCATCCTTTTATCTACTCA | 4191 | TGAGTAGATAAAAGGATGGATGG |
| 2928 | TCCATCCATCCTTTTATCTACTC | 4192 | GAGTAGATAAAAGGATGGATGGA |
| 2929 | CTCCATCCATCCTTTTATCTACT | 4193 | AGTAGATAAAAGGATGGATGGAG |
| 2930 | TCTCCATCCATCCTTTTATCTAC | 4194 | GTAGATAAAAGGATGGATGGAGA |
| 2931 | CTCTCCATCCATCCTTTTATCTA | 4195 | TAGATAAAAGGATGGATGGAGAG |
| 2932 | TCTCTCCATCCATCCTTTTATCT | 4196 | AGATAAAAGGATGGATGGAGAGA |
| 2933 | ATCTCTCCATCCATCCTTTTATC | 4197 | GATAAAAGGATGGATGGAGAGAT |
| 2934 | CATCTCTCCATCCATCCTTTTAT | 4198 | ATAAAAGGATGGATGGAGAGATG |
| 2935 | CCATCTCTCCATCCATCCTTTTA | 4199 | TAAAAGGATGGATGGAGAGATGG |
| 2936 | CCCATCTCTCCATCCATCCTTTT | 4200 | AAAAGGATGGATGGAGAGATGGG |
| 2938 | CACCCATCTCTCCATCCATCCTT | 4202 | AAGGATGGATGGAGAGATGGGTG |
| 2939 | TCACCCATCTCTCCATCCATCCT | 4203 | AGGATGGATGGAGAGATGGGTGA |
| 2940 | CTCACCCATCTCTCCATCCATCC | 4204 | GGATGGATGGAGAGATGGGTGAG |
| 2941 | ACTCACCCATCTCTCCATCCATC | 4205 | GATGGATGGAGAGATGGGTGAGT |
| 2942 | TACTCACCCATCTCTCCATCCAT | 4206 | ATGGATGGAGAGATGGGTGAGTA |
| 2943 | GTACTCACCCATCTCTCCATCCA | 4207 | TGGATGGAGAGATGGGTGAGTAC |
| 2944 | TGTACTCACCCATCTCTCCATCC | 4208 | GGATGGAGAGATGGGTGAGTACA |
| 2945 | ATGTACTCACCCATCTCTCCATC | 4209 | GATGGAGAGATGGGTGAGTACAT |
| 2946 | CATGTACTCACCCATCTCTCCAT | 4210 | ATGGAGAGATGGGTGAGTACATG |
| 2947 | CCATGTACTCACCCATCTCTCCA | 4211 | TGGAGAGATGGGTGAGTACATGG |
| 2948 | TCCATGTACTCACCCATCTCTCC | 4212 | GGAGAGATGGGTGAGTACATGGA |
| 2949 | ATCCATGTACTCACCCATCTCTC | 4213 | GAGAGATGGGTGAGTACATGGAT |
| 2950 | CATCCATGTACTCACCCATCTCT | 4214 | AGAGATGGGTGAGTACATGGATG |
| 2951 | CCATCCATGTACTCACCCATCTC | 4215 | GAGATGGGTGAGTACATGGATGG |
| 2952 | TCCATCCATGTACTCACCCATCT | 4216 | AGATGGGTGAGTACATGGATGGA |
| 2953 | ATCCATCCATGTACTCACCCATC | 4217 | GATGGGTGAGTACATGGATGGAT |
| 2954 | TATCCATCCATGTACTCACCCAT | 4218 | ATGGGTGAGTACATGGATGGATA |
| 2955 | CTATCCATCCATGTACTCACCCA | 4219 | TGGGTGAGTACATGGATGGATAG |
| 2956 | TCTATCCATCCATGTACTCACCC | 4220 | GGGTGAGTACATGGATGGATAGA |
| 2957 | ATCTATCCATCCATGTACTCACC | 4221 | GGTGAGTACATGGATGGATAGAT |
| 2958 | CATCTATCCATCCATGTACTCAC | 4222 | GTGAGTACATGGATGGATAGATG |
| 2959 | CCATCTATCCATCCATGTACTCA | 4223 | TGAGTACATGGATGGATAGATGG |
| 2960 | TCCATCTATCCATCCATGTACTC | 4224 | GAGTACATGGATGGATAGATGGA |
| 2961 | ATCCATCTATCCATCCATGTACT | 4225 | AGTACATGGATGGATAGATGGAT |
| 2962 | CATCCATCTATCCATCCATGTAC | 4226 | GTACATGGATGGATAGATGGATG |
| 2963 | TCATCCATCTATCCATCCATGTA | 4227 | TACATGGATGGATAGATGGATGA |
| 2964 | CTCATCCATCTATCCATCCATGT | 4228 | ACATGGATGGATAGATGGATGAG |
| 2965 | ACTCATCCATCTATCCATCCATG | 4229 | CATGGATGGATAGATGGATGAGT |
| 2966 | AACTCATCCATCTATCCATCCAT | 4230 | ATGGATGGATAGATGGATGAGTT |
| 2967 | CAACTCATCCATCTATCCATCCA | 4231 | TGGATGGATAGATGGATGAGTTG |
| 2968 | CCAACTCATCCATCTATCCATCC | 4232 | GGATGGATAGATGGATGAGTTGG |
| 2969 | ACCAACTCATCCATCTATCCATC | 4233 | GATGGATAGATGGATGAGTTGGT |
| 2970 | CACCAACTCATCCATCTATCCAT | 4234 | ATGGATAGATGGATGAGTTGGTG |
| 2971 | CCACCAACTCATCCATCTATCCA | 4235 | TGGATAGATGGATGAGTTGGTGG |
| 2972 | CCCACCAACTCATCCATCTATCC | 4236 | GGATAGATGGATGAGTTGGTGGG |
| 2973 | ACCCACCAACTCATCCATCTATC | 4237 | GATAGATGGATGAGTTGGTGGGT |
| 2974 | TACCCACCAACTCATCCATCTAT | 4238 | ATAGATGGATGAGTTGGTGGGTA |
| 2975 | CTACCCACCAACTCATCCATCTA | 4239 | TAGATGGATGAGTTGGTGGGTAG |
| 2976 | TCTACCCACCAACTCATCCATCT | 4240 | AGATGGATGAGTTGGTGGGTAGA |
| 2977 | ATCTACCCACCAACTCATCCATC | 4241 | GATGGATGAGTTGGTGGGTAGAT |
| 2978 | AATCTACCCACCAACTCATCCAT | 4242 | ATGGATGAGTTGGTGGGTAGATT |
| 2979 | GAATCTACCCACCAACTCATCCA | 4243 | TGGATGAGTTGGTGGGTAGATTC |
| 2981 | ACGAATCTACCCACCAACTCATC | 4245 | GATGAGTTGGTGGGTAGATTCGT |
| 2982 | CACGAATCTACCCACCAACTCAT | 4246 | ATGAGTTGGTGGGTAGATTCGTG |
| 2983 | CCACGAATCTACCCACCAACTCA | 4247 | TGAGTTGGTGGGTAGATTCGTGG |
| 2984 | GCCACGAATCTACCCACCAACTC | 4248 | GAGTTGGTGGGTAGATTCGTGGC |
| 2985 | AGCCACGAATCTACCCACCAACT | 4249 | AGTTGGTGGGTAGATTCGTGGCT |
| 2986 | TAGCCACGAATCTACCCACCAAC | 4250 | GTTGGTGGGTAGATTCGTGGCTA |
| 2987 | CTAGCCACGAATCTACCCACCAA | 4251 | TTGGTGGGTAGATTCGTGGCTAG |
| 2988 | TCTAGCCACGAATCTACCCACCA | 4252 | TGGTGGGTAGATTCGTGGCTAGA |
| 2989 | ATCTAGCCACGAATCTACCCACC | 4253 | GGTGGGTAGATTCGTGGCTAGAT |
| 2990 | CATCTAGCCACGAATCTACCCAC | 4254 | GTGGGTAGATTCGTGGCTAGATG |
| 2991 | CCATCTAGCCACGAATCTACCCA | 4255 | TGGGTAGATTCGTGGCTAGATGG |
| 2992 | TCCATCTAGCCACGAATCTACCC | 4256 | GGGTAGATTCGTGGCTAGATGGA |
| 2993 | ATCCATCTAGCCACGAATCTACC | 4257 | GGTAGATTCGTGGCTAGATGGAT |
| 2994 | CATCCATCTAGCCACGAATCTAC | 4258 | GTAGATTCGTGGCTAGATGGATG |
| 2995 | TCATCCATCTAGCCACGAATCTA | 4259 | TAGATTCGTGGCTAGATGGATGA |
| 2996 | ATCATCCATCTAGCCACGAATCT | 4260 | AGATTCGTGGCTAGATGGATGAT |
| 2997 | CATCATCCATCTAGCCACGAATC | 4261 | GATTCGTGGCTAGATGGATGATG |
| 2998 | CCATCATCCATCTAGCCACGAAT | 4262 | ATTCGTGGCTAGATGGATGATGG |
| 2999 | TCCATCATCCATCTAGCCACGAA | 4263 | TTCGTGGCTAGATGGATGATGGA |
| 3000 | ATCCATCATCCATCTAGCCACGA | 4264 | TCGTGGCTAGATGGATGATGGAT |
| 3001 | CATCCATCATCCATCTAGCCACG | 4265 | CGTGGCTAGATGGATGATGGATG |
| 3002 | CCATCCATCATCCATCTAGCCAC | 4266 | GTGGCTAGATGGATGATGGATGG |
| 3003 | TCCATCCATCATCCATCTAGCCA | 4267 | TGGCTAGATGGATGATGGATGGA |
| 3004 | ATCCATCCATCATCCATCTAGCC | 4268 | GGCTAGATGGATGATGGATGGAT |
| 3005 | CATCCATCCATCATCCATCTAGC | 4269 | GCTAGATGGATGATGGATGGATG |
| 3006 | CCATCCATCCATCATCCATCTAG | 4270 | CTAGATGGATGATGGATGGATGG |
| 3007 | TCCATCCATCCATCATCCATCTA | 4271 | TAGATGGATGATGGATGGATGGA |
| 3008 | GTCCATCCATCCATCATCCATCT | 4272 | AGATGGATGATGGATGGATGGAC |
| 3009 | TGTCCATCCATCCATCATCCATC | 4273 | GATGGATGATGGATGGATGGACA |
| 3010 | CTGTCCATCCATCCATCATCCAT | 4274 | ATGGATGATGGATGGATGGACAG |
| 3011 | TCTGTCCATCCATCCATCATCCA | 4275 | TGGATGATGGATGGATGGACAGA |
| 3012 | ATCTGTCCATCCATCCATCATCC | 4276 | GGATGATGGATGGATGGACAGAT |
| 3013 | CATCTGTCCATCCATCCATCATC | 4277 | GATGATGGATGGATGGACAGATG |
| 3014 | CCATCTGTCCATCCATCCATCAT | 4278 | ATGATGGATGGATGGACAGATGG |
| 3015 | TCCATCTGTCCATCCATCCATCA | 4279 | TGATGGATGGATGGACAGATGGA |
| 3016 | ATCCATCTGTCCATCCATCCATC | 4280 | GATGGATGGATGGACAGATGGAT |
| 3017 | CATCCATCTGTCCATCCATCCAT | 4281 | ATGGATGGATGGACAGATGGATG |
| 3018 | CCATCCATCTGTCCATCCATCCA | 4282 | TGGATGGATGGACAGATGGATGG |
| 3019 | TCCATCCATCTGTCCATCCATCC | 4283 | GGATGGATGGACAGATGGATGGA |
| 3020 | ATCCATCCATCTGTCCATCCATC | 4284 | GATGGATGGACAGATGGATGGAT |
| 3021 | TATCCATCCATCTGTCCATCCAT | 4285 | ATGGATGGACAGATGGATGGATA |
| 3022 | ATATCCATCCATCTGTCCATCCA | 4286 | TGGATGGACAGATGGATGGATAT |
| 3024 | ATATATCCATCCATCTGTCCATC | 4288 | GATGGACAGATGGATGGATATAT |
| 3025 | CATATATCCATCCATCTGTCCAT | 4289 | ATGGACAGATGGATGGATATATG |
| 3026 | TCATATATCCATCCATCTGTCCA | 4290 | TGGACAGATGGATGGATATATGA |
| 3027 | ATCATATATCCATCCATCTGTCC | 4291 | GGACAGATGGATGGATATATGAT |
| 3028 | AATCATATATCCATCCATCTGTC | 4292 | GACAGATGGATGGATATATGATT |
| 3029 | CAATCATATATCCATCCATCTGT | 4293 | ACAGATGGATGGATATATGATTG |
| 3030 | TCAATCATATATCCATCCATCTG | 4294 | CAGATGGATGGATATATGATTGA |
| 3031 | TTCAATCATATATCCATCCATCT | 4295 | AGATGGATGGATATATGATTGAA |
| 3032 | GTTCAATCATATATCCATCCATC | 4296 | GATGGATGGATATATGATTGAAC |
| 3033 | AGTTCAATCATATATCCATCCAT | 4297 | ATGGATGGATATATGATTGAACT |
| 3034 | TAGTTCAATCATATATCCATCCA | 4298 | TGGATGGATATATGATTGAACTA |
| 3035 | ATAGTTCAATCATATATCCATCC | 4299 | GGATGGATATATGATTGAACTAT |
| 3036 | AATAGTTCAATCATATATCCATC | 4300 | GATGGATATATGATTGAACTATT |
| 3037 | CAATAGTTCAATCATATATCCAT | 4301 | ATGGATATATGATTGAACTATTG |
| 3038 | TCAATAGTTCAATCATATATCCA | 4302 | TGGATATATGATTGAACTATTGA |
| 3039 | TTCAATAGTTCAATCATATATCC | 4303 | GGATATATGATTGAACTATTGAA |
| 3040 | TTTCAATAGTTCAATCATATATC | 4304 | GATATATGATTGAACTATTGAAA |
| 3041 | CTTTCAATAGTTCAATCATATAT | 4305 | ATATATGATTGAACTATTGAAAG |
| 3042 | ACTTTCAATAGTTCAATCATATA | 4306 | TATATGATTGAACTATTGAAAGT |
| 3043 | TACTTTCAATAGTTCAATCATAT | 4307 | ATATGATTGAACTATTGAAAGTA |
| 3044 | ATACTTTCAATAGTTCAATCATA | 4308 | TATGATTGAACTATTGAAAGTAT |
| 3045 | TATACTTTCAATAGTTCAATCAT | 4309 | ATGATTGAACTATTGAAAGTATA |
| 3046 | CTATACTTTCAATAGTTCAATCA | 4310 | TGATTGAACTATTGAAAGTATAG |
| 3047 | TCTATACTTTCAATAGTTCAATC | 4311 | GATTGAACTATTGAAAGTATAGA |
| 3048 | ATCTATACTTTCAATAGTTCAAT | 4312 | ATTGAACTATTGAAAGTATAGAT |
| 3049 | CATCTATACTTTCAATAGTTCAA | 4313 | TTGAACTATTGAAAGTATAGATG |
| 3050 | ACATCTATACTTTCAATAGTTCA | 4314 | TGAACTATTGAAAGTATAGATGT |
| 3051 | TACATCTATACTTTCAATAGTTC | 4315 | GAACTATTGAAAGTATAGATGTA |
| 3052 | ATACATCTATACTTTCAATAGTT | 4316 | AACTATTGAAAGTATAGATGTAT |
| 3053 | CATACATCTATACTTTCAATAGT | 4317 | ACTATTGAAAGTATAGATGTATG |
| 3054 | CCATACATCTATACTTTCAATAG | 4318 | CTATTGAAAGTATAGATGTATGG |
| 3055 | TCCATACATCTATACTTTCAATA | 4319 | TATTGAAAGTATAGATGTATGGA |
| 3056 | ATCCATACATCTATACTTTCAAT | 4320 | ATTGAAAGTATAGATGTATGGAT |
| 3057 | CATCCATACATCTATACTTTCAA | 4321 | TTGAAAGTATAGATGTATGGATG |
| 3058 | CCATCCATACATCTATACTTTCA | 4322 | TGAAAGTATAGATGTATGGATGG |
| 3059 | CCCATCCATACATCTATACTTTC | 4323 | GAAAGTATAGATGTATGGATGGG |
| 3060 | ACCCATCCATACATCTATACTTT | 4324 | AAAGTATAGATGTATGGATGGGT |
| 3061 | CACCCATCCATACATCTATACTT | 4325 | AAGTATAGATGTATGGATGGGTG |
| 3062 | TCACCCATCCATACATCTATACT | 4326 | AGTATAGATGTATGGATGGGTGA |
| 3063 | TTCACCCATCCATACATCTATAC | 4327 | GTATAGATGTATGGATGGGTGAA |
| 3064 | ATTCACCCATCCATACATCTATA | 4328 | TATAGATGTATGGATGGGTGAAT |
| 3065 | AATTCACCCATCCATACATCTAT | 4329 | ATAGATGTATGGATGGGTGAATT |
| 3067 | CAAATTCACCCATCCATACATCT | 4331 | AGATGTATGGATGGGTGAATTTG |
| 3068 | CCAAATTCACCCATCCATACATC | 4332 | GATGTATGGATGGGTGAATTTGG |
| 3069 | CCCAAATTCACCCATCCATACAT | 4333 | ATGTATGGATGGGTGAATTTGGG |
| 3070 | CCCCAAATTCACCCATCCATACA | 4334 | TGTATGGATGGGTGAATTTGGGG |
| 3071 | CCCCCAAATTCACCCATCCATAC | 4335 | GTATGGATGGGTGAATTTGGGGG |
| 3072 | ACCCCCAAATTCACCCATCCATA | 4336 | TATGGATGGGTGAATTTGGGGGT |
| 3073 | TACCCCCAAATTCACCCATCCAT | 4337 | ATGGATGGGTGAATTTGGGGGTA |
| 3074 | TTACCCCCAAATTCACCCATCCA | 4338 | TGGATGGGTGAATTTGGGGGTAA |
| 3075 | ATTACCCCCAAATTCACCCATCC | 4339 | GGATGGGTGAATTTGGGGGTAAT |
| 3076 | AATTACCCCCAAATTCACCCATC | 4340 | GATGGGTGAATTTGGGGGTAATT |
| 3077 | CAATTACCCCCAAATTCACCCAT | 4341 | ATGGGTGAATTTGGGGGTAATTG |
| 3078 | ACAATTACCCCCAAATTCACCCA | 4342 | TGGGTGAATTTGGGGGTAATTGT |
| 3079 | AACAATTACCCCCAAATTCACCC | 4343 | GGGTGAATTTGGGGGTAATTGTT |
| 3080 | TAACAATTACCCCCAAATTCACC | 4344 | GGTGAATTTGGGGGTAATTGTTA |
| 3081 | CTAACAATTACCCCCAAATTCAC | 4345 | GTGAATTTGGGGGTAATTGTTAG |
| 3082 | TCTAACAATTACCCCCAAATTCA | 4346 | TGAATTTGGGGGTAATTGTTAGA |
| 3083 | ATCTAACAATTACCCCCAAATTC | 4347 | GAATTTGGGGGTAATTGTTAGAT |
| 3084 | CATCTAACAATTACCCCCAAATT | 4348 | AATTTGGGGGTAATTGTTAGATG |
| 3085 | TCATCTAACAATTACCCCCAAAT | 4349 | ATTTGGGGGTAATTGTTAGATGA |
| 3086 | ATCATCTAACAATTACCCCCAAA | 4350 | TTTGGGGGTAATTGTTAGATGAT |
| 3087 | CATCATCTAACAATTACCCCCAA | 4351 | TTGGGGGTAATTGTTAGATGATG |
| 3088 | CCATCATCTAACAATTACCCCCA | 4352 | TGGGGGTAATTGTTAGATGATGG |
| 3089 | TCCATCATCTAACAATTACCCCC | 4353 | GGGGGTAATTGTTAGATGATGGA |
| 3090 | ATCCATCATCTAACAATTACCCC | 4354 | GGGGTAATTGTTAGATGATGGAT |
| 3091 | CATCCATCATCTAACAATTACCC | 4355 | GGGTAATTGTTAGATGATGGATG |
| 3092 | TCATCCATCATCTAACAATTACC | 4356 | GGTAATTGTTAGATGATGGATGA |
| 3093 | CTCATCCATCATCTAACAATTAC | 4357 | GTAATTGTTAGATGATGGATGAG |
| 3094 | ACTCATCCATCATCTAACAATTA | 4358 | TAATTGTTAGATGATGGATGAGT |
| 3095 | TACTCATCCATCATCTAACAATT | 4359 | AATTGTTAGATGATGGATGAGTA |
| 3096 | ATACTCATCCATCATCTAACAAT | 4360 | ATTGTTAGATGATGGATGAGTAT |
| 3097 | TATACTCATCCATCATCTAACAA | 4361 | TTGTTAGATGATGGATGAGTATA |
| 3098 | CTATACTCATCCATCATCTAACA | 4362 | TGTTAGATGATGGATGAGTATAG |
| 3099 | TCTATACTCATCCATCATCTAAC | 4363 | GTTAGATGATGGATGAGTATAGA |
| 3100 | ATCTATACTCATCCATCATCTAA | 4364 | TTAGATGATGGATGAGTATAGAT |
| 3101 | CATCTATACTCATCCATCATCTA | 4365 | TAGATGATGGATGAGTATAGATG |
| 3102 | TCATCTATACTCATCCATCATCT | 4366 | AGATGATGGATGAGTATAGATGA |
| 3103 | TTCATCTATACTCATCCATCATC | 4367 | GATGATGGATGAGTATAGATGAA |
| 3104 | ATTCATCTATACTCATCCATCAT | 4368 | ATGATGGATGAGTATAGATGAAT |
| 3105 | CATTCATCTATACTCATCCATCA | 4369 | TGATGGATGAGTATAGATGAATG |
| 3106 | TCATTCATCTATACTCATCCATC | 4370 | GATGGATGAGTATAGATGAATGA |
| 3107 | ATCATTCATCTATACTCATCCAT | 4371 | ATGGATGAGTATAGATGAATGAT |
| 3108 | CATCATTCATCTATACTCATCCA | 4372 | TGGATGAGTATAGATGAATGATG |
| 3110 | TCCATCATTCATCTATACTCATC | 4374 | GATGAGTATAGATGAATGATGGA |
| 3111 | ATCCATCATTCATCTATACTCAT | 4375 | ATGAGTATAGATGAATGATGGAT |
| 3112 | CATCCATCATTCATCTATACTCA | 4376 | TGAGTATAGATGAATGATGGATG |
| 3113 | CCATCCATCATTCATCTATACTC | 4377 | GAGTATAGATGAATGATGGATGG |
| 3114 | TCCATCCATCATTCATCTATACT | 4378 | AGTATAGATGAATGATGGATGGA |
| 3115 | ATCCATCCATCATTCATCTATAC | 4379 | GTATAGATGAATGATGGATGGAT |
| 3116 | TATCCATCCATCATTCATCTATA | 4380 | TATAGATGAATGATGGATGGATA |
| 3117 | TTATCCATCCATCATTCATCTAT | 4381 | ATAGATGAATGATGGATGGATAA |
| 3118 | GTTATCCATCCATCATTCATCTA | 4382 | TAGATGAATGATGGATGGATAAC |
| 3119 | AGTTATCCATCCATCATTCATCT | 4383 | AGATGAATGATGGATGGATAACT |
| 3120 | AAGTTATCCATCCATCATTCATC | 4384 | GATGAATGATGGATGGATAACTT |
| 3121 | CAAGTTATCCATCCATCATTCAT | 4385 | ATGAATGATGGATGGATAACTTG |
| 3122 | TCAAGTTATCCATCCATCATTCA | 4386 | TGAATGATGGATGGATAACTTGA |
| 3123 | ATCAAGTTATCCATCCATCATTC | 4387 | GAATGATGGATGGATAACTTGAT |
| 3124 | CATCAAGTTATCCATCCATCATT | 4388 | AATGATGGATGGATAACTTGATG |
| 3125 | TCATCAAGTTATCCATCCATCAT | 4389 | ATGATGGATGGATAACTTGATGA |
| 3126 | CTCATCAAGTTATCCATCCATCA | 4390 | TGATGGATGGATAACTTGATGAG |
| 3127 | ACTCATCAAGTTATCCATCCATC | 4391 | GATGGATGGATAACTTGATGAGT |
| 3128 | CACTCATCAAGTTATCCATCCAT | 4392 | ATGGATGGATAACTTGATGAGTG |
| 3129 | CCACTCATCAAGTTATCCATCCA | 4393 | TGGATGGATAACTTGATGAGTGG |
| 3130 | TCCACTCATCAAGTTATCCATCC | 4394 | GGATGGATAACTTGATGAGTGGA |
| 3131 | ATCCACTCATCAAGTTATCCATC | 4395 | GATGGATAACTTGATGAGTGGAT |
| 3132 | TATCCACTCATCAAGTTATCCAT | 4396 | ATGGATAACTTGATGAGTGGATA |
| 3133 | CTATCCACTCATCAAGTTATCCA | 4397 | TGGATAACTTGATGAGTGGATAG |
| 3134 | TCTATCCACTCATCAAGTTATCC | 4398 | GGATAACTTGATGAGTGGATAGA |
| 3135 | ATCTATCCACTCATCAAGTTATC | 4399 | GATAACTTGATGAGTGGATAGAT |
| 3136 | TATCTATCCACTCATCAAGTTAT | 4400 | ATAACTTGATGAGTGGATAGATA |
| 3137 | CTATCTATCCACTCATCAAGTTA | 4401 | TAACTTGATGAGTGGATAGATAG |
| 3138 | TCTATCTATCCACTCATCAAGTT | 4402 | AACTTGATGAGTGGATAGATAGA |
| 3139 | ATCTATCTATCCACTCATCAAGT | 4403 | ACTTGATGAGTGGATAGATAGAT |
| 3140 | AATCTATCTATCCACTCATCAAG | 4404 | CTTGATGAGTGGATAGATAGATT |
| 3141 | CAATCTATCTATCCACTCATCAA | 4405 | TTGATGAGTGGATAGATAGATTG |
| 3142 | GCAATCTATCTATCCACTCATCA | 4406 | TGATGAGTGGATAGATAGATTGC |
| 3143 | AGCAATCTATCTATCCACTCATC | 4407 | GATGAGTGGATAGATAGATTGCT |
| 3144 | CAGCAATCTATCTATCCACTCAT | 4408 | ATGAGTGGATAGATAGATTGCTG |
| 3145 | CCAGCAATCTATCTATCCACTCA | 4409 | TGAGTGGATAGATAGATTGCTGG |
| 3146 | TCCAGCAATCTATCTATCCACTC | 4410 | GAGTGGATAGATAGATTGCTGGA |
| 3147 | ATCCAGCAATCTATCTATCCACT | 4411 | AGTGGATAGATAGATTGCTGGAT |
| 3148 | TATCCAGCAATCTATCTATCCAC | 4412 | GTGGATAGATAGATTGCTGGATA |
| 3149 | CTATCCAGCAATCTATCTATCCA | 4413 | TGGATAGATAGATTGCTGGATAG |
| 3150 | TCTATCCAGCAATCTATCTATCC | 4414 | GGATAGATAGATTGCTGGATAGA |
| 3151 | ATCTATCCAGCAATCTATCTATC | 4415 | GATAGATAGATTGCTGGATAGAT |
| 3153 | TCATCTATCCAGCAATCTATCTA | 4417 | TAGATAGATTGCTGGATAGATGA |
| 3154 | ATCATCTATCCAGCAATCTATCT | 4418 | AGATAGATTGCTGGATAGATGAT |
| 3155 | AATCATCTATCCAGCAATCTATC | 4419 | GATAGATTGCTGGATAGATGATT |
| 3156 | CAATCATCTATCCAGCAATCTAT | 4420 | ATAGATTGCTGGATAGATGATTG |
| 3157 | TCAATCATCTATCCAGCAATCTA | 4421 | TAGATTGCTGGATAGATGATTGA |
| 3158 | GTCAATCATCTATCCAGCAATCT | 4422 | AGATTGCTGGATAGATGATTGAC |
| 3159 | AGTCAATCATCTATCCAGCAATC | 4423 | GATTGCTGGATAGATGATTGACT |
| 3160 | CAGTCAATCATCTATCCAGCAAT | 4424 | ATTGCTGGATAGATGATTGACTG |
| 3161 | CCAGTCAATCATCTATCCAGCAA | 4425 | TTGCTGGATAGATGATTGACTGG |
| 3162 | CCCAGTCAATCATCTATCCAGCA | 4426 | TGCTGGATAGATGATTGACTGGG |
| 3163 | ACCCAGTCAATCATCTATCCAGC | 4427 | GCTGGATAGATGATTGACTGGGT |
| 3164 | CACCCAGTCAATCATCTATCCAG | 4428 | CTGGATAGATGATTGACTGGGTG |
| 3165 | CCACCCAGTCAATCATCTATCCA | 4429 | TGGATAGATGATTGACTGGGTGG |
| 3166 | TCCACCCAGTCAATCATCTATCC | 4430 | GGATAGATGATTGACTGGGTGGA |
| 3167 | ATCCACCCAGTCAATCATCTATC | 4431 | GATAGATGATTGACTGGGTGGAT |
| 3168 | TATCCACCCAGTCAATCATCTAT | 4432 | ATAGATGATTGACTGGGTGGATA |
| 3169 | CTATCCACCCAGTCAATCATCTA | 4433 | TAGATGATTGACTGGGTGGATAG |
| 3170 | TCTATCCACCCAGTCAATCATCT | 4434 | AGATGATTGACTGGGTGGATAGA |
| 3171 | ATCTATCCACCCAGTCAATCATC | 4435 | GATGATTGACTGGGTGGATAGAT |
| 3172 | CATCTATCCACCCAGTCAATCAT | 4436 | ATGATTGACTGGGTGGATAGATG |
| 3173 | TCATCTATCCACCCAGTCAATCA | 4437 | TGATTGACTGGGTGGATAGATGA |
| 3174 | TTCATCTATCCACCCAGTCAATC | 4438 | GATTGACTGGGTGGATAGATGAA |
| 3175 | TTTCATCTATCCACCCAGTCAAT | 4439 | ATTGACTGGGTGGATAGATGAAA |
| 3176 | ATTTCATCTATCCACCCAGTCAA | 4440 | TTGACTGGGTGGATAGATGAAAT |
| 3177 | CATTTCATCTATCCACCCAGTCA | 4441 | TGACTGGGTGGATAGATGAAATG |
| 3178 | ACATTTCATCTATCCACCCAGTC | 4442 | GACTGGGTGGATAGATGAAATGT |
| 3179 | AACATTTCATCTATCCACCCAGT | 4443 | ACTGGGTGGATAGATGAAATGTT |
| 3180 | CAACATTTCATCTATCCACCCAG | 4444 | CTGGGTGGATAGATGAAATGTTG |
| 3181 | CCAACATTTCATCTATCCACCCA | 4445 | TGGGTGGATAGATGAAATGTTGG |
| 3182 | TCCAACATTTCATCTATCCACCC | 4446 | GGGTGGATAGATGAAATGTTGGA |
| 3183 | ATCCAACATTTCATCTATCCACC | 4447 | GGTGGATAGATGAAATGTTGGAT |
| 3184 | CATCCAACATTTCATCTATCCAC | 4448 | GTGGATAGATGAAATGTTGGATG |
| 3185 | TCATCCAACATTTCATCTATCCA | 4449 | TGGATAGATGAAATGTTGGATGA |
| 3186 | CTCATCCAACATTTCATCTATCC | 4450 | GGATAGATGAAATGTTGGATGAG |
| 3187 | GCTCATCCAACATTTCATCTATC | 4451 | GATAGATGAAATGTTGGATGAGC |
| 3188 | TGCTCATCCAACATTTCATCTAT | 4452 | ATAGATGAAATGTTGGATGAGCA |
| 3189 | CTGCTCATCCAACATTTCATCTA | 4453 | TAGATGAAATGTTGGATGAGCAG |
| 3190 | TCTGCTCATCCAACATTTCATCT | 4454 | AGATGAAATGTTGGATGAGCAGA |
| 3191 | ATCTGCTCATCCAACATTTCATC | 4455 | GATGAAATGTTGGATGAGCAGAT |
| 3192 | AATCTGCTCATCCAACATTTCAT | 4456 | ATGAAATGTTGGATGAGCAGATT |
| 3193 | TAATCTGCTCATCCAACATTTCA | 4457 | TGAAATGTTGGATGAGCAGATTA |
| 3194 | TTAATCTGCTCATCCAACATTTC | 4458 | GAAATGTTGGATGAGCAGATTAA |
| 3196 | ACTTAATCTGCTCATCCAACATT | 4460 | AATGTTGGATGAGCAGATTAAGT |
| 3197 | AACTTAATCTGCTCATCCAACAT | 4461 | ATGTTGGATGAGCAGATTAAGTT |
| 3198 | CAACTTAATCTGCTCATCCAACA | 4462 | TGTTGGATGAGCAGATTAAGTTG |
| 3199 | ACAACTTAATCTGCTCATCCAAC | 4463 | GTTGGATGAGCAGATTAAGTTGT |
| 3200 | TACAACTTAATCTGCTCATCCAA | 4464 | TTGGATGAGCAGATTAAGTIGTA |
| 3201 | ATACAACTTAATCTGCTCATCCA | 4465 | TGGATGAGCAGATTAAGTIGTAT |
| 3202 | AATACAACTTAATCTGCTCATCC | 4466 | GGATGAGCAGATTAAGTTGTATT |
| 3203 | CAATACAACTTAATCTGCTCATC | 4467 | GATGAGCAGATTAAGTTGTATTG |
| 3204 | CCAATACAACTTAATCTGCTCAT | 4468 | ATGAGCAGATTAAGTTGTATTGG |
| 3205 | TCCAATACAACTTAATCTGCTCA | 4469 | TGAGCAGATTAAGTTGTATTGGA |
| 3206 | ATCCAATACAACTTAATCTGCTC | 4470 | GAGCAGATTAAGTTGTATTGGAT |
| 3207 | CATCCAATACAACTTAATCTGCT | 4471 | AGCAGATTAAGTIGTATTGGATG |
| 3208 | CCATCCAATACAACTTAATCTGC | 4472 | GCAGATTAAGTTGTATTGGATGG |
| 3209 | CCCATCCAATACAACTTAATCTG | 4473 | CAGATTAAGTTGTATTGGATGGG |
| 3210 | TCCCATCCAATACAACTTAATCT | 4474 | AGATTAAGTTGTATTGGATGGGA |
| 3211 | ATCCCATCCAATACAACTTAATC | 4475 | GATTAAGTTGTATTGGATGGGAT |
| 3212 | CATCCCATCCAATACAACTTAAT | 4476 | ATTAAGTTGTATTGGATGGGATG |
| 3213 | CCATCCCATCCAATACAACTTAA | 4477 | TTAAGTTGTATTGGATGGGATGG |
| 3214 | TCCATCCCATCCAATACAACTTA | 4478 | TAAGTTGTATTGGATGGGATGGA |
| 3215 | ATCCATCCCATCCAATACAACTT | 4479 | AAGTTGTATTGGATGGGATGGAT |
| 3216 | CATCCATCCCATCCAATACAACT | 4480 | AGTTGTATTGGATGGGATGGATG |
| 3217 | CCATCCATCCCATCCAATACAAC | 4481 | GTTGTATTGGATGGGATGGATGG |
| 3218 | TCCATCCATCCCATCCAATACAA | 4482 | TTGTATTGGATGGGATGGATGGA |
| 3219 | TTCCATCCATCCCATCCAATACA | 4483 | TGTATTGGATGGGATGGATGGAA |
| 3220 | CTTCCATCCATCCCATCCAATAC | 4484 | GTATTGGATGGGATGGATGGAAG |
| 3221 | ACTTCCATCCATCCCATCCAATA | 4485 | TATTGGATGGGATGGATGGAAGT |
| 3222 | CACTTCCATCCATCCCATCCAAT | 4486 | ATTGGATGGGATGGATGGAAGTG |
| 3223 | ACACTTCCATCCATCCCATCCAA | 4487 | TTGGATGGGATGGATGGAAGTGT |
| 3224 | CACACTTCCATCCATCCCATCCA | 4488 | TGGATGGGATGGATGGAAGTGTG |
| 3225 | CCACACTTCCATCCATCCCATCC | 4489 | GGATGGGATGGATGGAAGTGTGG |
| 3226 | ACCACACTTCCATCCATCCCATC | 4490 | GATGGGATGGATGGAAGTGTGGT |
| 3227 | AACCACACTTCCATCCATCCCAT | 4491 | ATGGGATGGATGGAAGTGTGGTT |
| 3228 | CAACCACACTTCCATCCATCCCA | 4492 | TGGGATGGATGGAAGTGTGGTTG |
| 3229 | TCAACCACACTTCCATCCATCCC | 4493 | GGGATGGATGGAAGTGTGGTTGA |
| 3230 | CTCAACCACACTTCCATCCATCC | 4494 | GGATGGATGGAAGTGTGGTTGAG |
| 3231 | ACTCAACCACACTTCCATCCATC | 4495 | GATGGATGGAAGTGTGGTTGAGT |
| 3232 | AACTCAACCACACTTCCATCCAT | 4496 | ATGGATGGAAGTGTGGTTGAGTT |
| 3233 | TAACTCAACCACACTTCCATCCA | 4497 | TGGATGGAAGTGTGGTTGAGTTA |
| 3234 | ATAACTCAACCACACTTCCATCC | 4498 | GGATGGAAGTGTGGTTGAGTTAT |
| 3235 | AATAACTCAACCACACTTCCATC | 4499 | GATGGAAGTGTGGTTGAGTTATT |
| 3236 | TAATAACTCAACCACACTTCCAT | 4500 | ATGGAAGTGTGGTTGAGTTATTA |
| 3237 | CTAATAACTCAACCACACTTCCA | 4501 | TGGAAGTGTGGTTGAGTTATTAG |
| 3239 | TTCTAATAACTCAACCACACTTC | 4503 | GAAGTGTGGTTGAGTTATTAGAA |
| 3240 | CTTCTAATAACTCAACCACACTT | 4504 | AAGTGTGGTTGAGTTATTAGAAG |
| 3241 | CCTTCTAATAACTCAACCACACT | 4505 | AGTGTGGTTGAGTTATTAGAAGG |
| 3242 | TCCTTCTAATAACTCAACCACAC | 4506 | GTGTGGTTGAGTTATTAGAAGGA |
| 3243 | TTCCTTCTAATAACTCAACCACA | 4507 | TGTGGTTGAGTTATTAGAAGGAA |
| 3244 | CTTCCTTCTAATAACTCAACCAC | 4508 | GTGGTTGAGTTATTAGAAGGAAG |
| 3245 | TCTTCCTTCTAATAACTCAACCA | 4509 | TGGTTGAGTTATTAGAAGGAAGA |
| 3246 | ATCTTCCTTCTAATAACTCAACC | 4510 | GGTTGAGTTATTAGAAGGAAGAT |
| 3247 | AATCTTCCTTCTAATAACTCAAC | 4511 | GTTGAGTTATTAGAAGGAAGATT |
| 3248 | CAATCTTCCTTCTAATAACTCAA | 4512 | TTGAGTTATTAGAAGGAAGATTG |
| 3249 | TCAATCTTCCTTCTAATAACTCA | 4513 | TGAGTTATTAGAAGGAAGATTGA |
| 3250 | CTCAATCTTCCTTCTAATAACTC | 4514 | GAGTTATTAGAAGGAAGATTGAG |
| 3251 | ACTCAATCTTCCTTCTAATAACT | 4515 | AGTTATTAGAAGGAAGATTGAGT |
| 3252 | TACTCAATCTTCCTTCTAATAAC | 4516 | GTTATTAGAAGGAAGATTGAGTA |
| 3253 | CTACTCAATCTTCCTTCTAATAA | 4517 | TTATTAGAAGGAAGATTGAGTAG |
| 3254 | TCTACTCAATCTTCCTTCTAATA | 4518 | TATTAGAAGGAAGATTGAGTAGA |
| 3255 | ATCTACTCAATCTTCCTTCTAAT | 4519 | ATTAGAAGGAAGATTGAGTAGAT |
| 3256 | TATCTACTCAATCTTCCTTCTAA | 4520 | TTAGAAGGAAGATTGAGTAGATA |
| 3257 | CTATCTACTCAATCTTCCTTCTA | 4521 | TAGAAGGAAGATTGAGTAGATAG |
| 3258 | CCTATCTACTCAATCTTCCTTCT | 4522 | AGAAGGAAGATTGAGTAGATAGG |
| 3259 | ACCTATCTACTCAATCTTCCTTC | 4523 | GAAGGAAGATTGAGTAGATAGGT |
| 3260 | CACCTATCTACTCAATCTTCCTT | 4524 | AAGGAAGATTGAGTAGATAGGTG |
| 3261 | TCACCTATCTACTCAATCTTCCT | 4525 | AGGAAGATTGAGTAGATAGGTGA |
| 3262 | TTCACCTATCTACTCAATCTTCC | 4526 | GGAAGATTGAGTAGATAGGTGAA |
| 3263 | ATTCACCTATCTACTCAATCTTC | 4527 | GAAGATTGAGTAGATAGGTGAAT |
| 3264 | AATTCACCTATCTACTCAATCTT | 4528 | AAGATTGAGTAGATAGGTGAATT |
| 3265 | AAATTCACCTATCTACTCAATCT | 4529 | AGATTGAGTAGATAGGTGAATTT |
| 3266 | CAAATTCACCTATCTACTCAATC | 4530 | GATTGAGTAGATAGGTGAATTTG |
| 3267 | ACAAATTCACCTATCTACTCAAT | 4531 | ATTGAGTAGATAGGTGAATTTGT |
| 3268 | AACAAATTCACCTATCTACTCAA | 4532 | TTGAGTAGATAGGTGAATTTGTT |
| 3269 | CAACAAATTCACCTATCTACTCA | 4533 | TGAGTAGATAGGTGAATTTGTTG |
| 3270 | TCAACAAATTCACCTATCTACTC | 4534 | GAGTAGATAGGTGAATTTGTTGA |
| 3271 | ATCAACAAATTCACCTATCTACT | 4535 | AGTAGATAGGTGAATTTGTTGAT |
| 3272 | TATCAACAAATTCACCTATCTAC | 4536 | GTAGATAGGTGAATTTGTTGATA |
| 3273 | CTATCAACAAATTCACCTATCTA | 4537 | TAGATAGGTGAATTTGTTGATAG |
| 3274 | ACTATCAACAAATTCACCTATCT | 4538 | AGATAGGTGAATTTGTTGATAGT |
| 3275 | GACTATCAACAAATTCACCTATC | 4539 | GATAGGTGAATTTGTTGATAGTC |
| 3276 | TGACTATCAACAAATTCACCTAT | 4540 | ATAGGTGAATTTGTTGATAGTCA |
| 3277 | CTGACTATCAACAAATTCACCTA | 4541 | TAGGTGAATTTGTTGATAGTCAG |
| 3278 | TCTGACTATCAACAAATTCACCT | 4542 | AGGTGAATTTGTTGATAGTCAGA |
| 3279 | ATCTGACTATCAACAAATTCACC | 4543 | GGTGAATTTGTTGATAGTCAGAT |
| 3280 | CATCTGACTATCAACAAATTCAC | 4544 | GTGAATTTGTTGATAGTCAGATG |
| 3282 | CCCATCTGACTATCAACAAATTC | 4546 | GAATTTGTTGATAGTCAGATGGG |
| 3283 | ACCCATCTGACTATCAACAAATT | 4547 | AATTTGTTGATAGTCAGATGGGT |
| 3284 | TACCCATCTGACTATCAACAAAT | 4548 | ATTTGTTGATAGTCAGATGGGTA |
| 3285 | CTACCCATCTGACTATCAACAAA | 4549 | TTTGTTGATAGTCAGATGGGTAG |
| 3286 | TCTACCCATCTGACTATCAACAA | 4550 | TTGTTGATAGTCAGATGGGTAGA |
| 3287 | ATCTACCCATCTGACTATCAACA | 4551 | TGTTGATAGTCAGATGGGTAGAT |
| 3288 | TATCTACCCATCTGACTATCAAC | 4552 | GTTGATAGTCAGATGGGTAGATA |
| 3289 | CTATCTACCCATCTGACTATCAA | 4553 | TTGATAGTCAGATGGGTAGATAG |
| 3290 | CCTATCTACCCATCTGACTATCA | 4554 | TGATAGTCAGATGGGTAGATAGG |
| 3291 | ACCTATCTACCCATCTGACTATC | 4555 | GATAGTCAGATGGGTAGATAGGT |
| 3292 | TACCTATCTACCCATCTGACTAT | 4556 | ATAGTCAGATGGGTAGATAGGTA |
| 3293 | CTACCTATCTACCCATCTGACTA | 4557 | TAGTCAGATGGGTAGATAGGTAG |
| 3294 | TCTACCTATCTACCCATCTGACT | 4558 | AGTCAGATGGGTAGATAGGTAGA |
| 3295 | ATCTACCTATCTACCCATCTGAC | 4559 | GTCAGATGGGTAGATAGGTAGAT |
| 3296 | CATCTACCTATCTACCCATCTGA | 4560 | TCAGATGGGTAGATAGGTAGATG |
| 3297 | CCATCTACCTATCTACCCATCTG | 4561 | CAGATGGGTAGATAGGTAGATGG |
| 3298 | TCCATCTACCTATCTACCCATCT | 4562 | AGATGGGTAGATAGGTAGATGGA |
| 3299 | ATCCATCTACCTATCTACCCATC | 4563 | GATGGGTAGATAGGTAGATGGAT |
| 3300 | CATCCATCTACCTATCTACCCAT | 4564 | ATGGGTAGATAGGTAGATGGATG |
| 3301 | CCATCCATCTACCTATCTACCCA | 4565 | TGGGTAGATAGGTAGATGGATGG |
| 3302 | TCCATCCATCTACCTATCTACCC | 4566 | GGGTAGATAGGTAGATGGATGGA |
| 3303 | ATCCATCCATCTACCTATCTACC | 4567 | GGTAGATAGGTAGATGGATGGAT |
| 3304 | CATCCATCCATCTACCTATCTAC | 4568 | GTAGATAGGTAGATGGATGGATG |
| 3305 | CCATCCATCCATCTACCTATCTA | 4569 | TAGATAGGTAGATGGATGGATGG |
| 3306 | TCCATCCATCCATCTACCTATCT | 4570 | AGATAGGTAGATGGATGGATGGA |
| 3307 | ATCCATCCATCCATCTACCTATC | 4571 | GATAGGTAGATGGATGGATGGAT |
| 3308 | CATCCATCCATCCATCTACCTAT | 4572 | ATAGGTAGATGGATGGATGGATG |
| 3309 | CCATCCATCCATCCATCTACCTA | 4573 | TAGGTAGATGGATGGATGGATGG |
| 3310 | TCCATCCATCCATCCATCTACCT | 4574 | AGGTAGATGGATGGATGGATGGA |
| 3311 | ATCCATCCATCCATCCATCTACC | 4575 | GGTAGATGGATGGATGGATGGAT |
| 3312 | CATCCATCCATCCATCCATCTAC | 4576 | GTAGATGGATGGATGGATGGATG |
| 3313 | CCATCCATCCATCCATCCATCTA | 4577 | TAGATGGATGGATGGATGGATGG |
| 3314 | TCCATCCATCCATCCATCCATCT | 4578 | AGATGGATGGATGGATGGATGGA |
| 3315 | ATCCATCCATCCATCCATCCATC | 4579 | GATGGATGGATGGATGGATGGAT |
| 3316 | CATCCATCCATCCATCCATCCAT | 4580 | ATGGATGGATGGATGGATGGATG |
| 3317 | ACATCCATCCATCCATCCATCCA | 4581 | TGGATGGATGGATGGATGGATGT |
| 3318 | TACATCCATCCATCCATCCATCC | 4582 | GGATGGATGGATGGATGGATGTA |
| 3319 | ATACATCCATCCATCCATCCATC | 4583 | GATGGATGGATGGATGGATGTAT |
| 3320 | TATACATCCATCCATCCATCCAT | 4584 | ATGGATGGATGGATGGATGTATA |
| 3321 | CTATACATCCATCCATCCATCCA | 4585 | TGGATGGATGGATGGATGTATAG |
| 3322 | CCTATACATCCATCCATCCATCC | 4586 | GGATGGATGGATGGATGTATAGG |
| 3323 | GCCTATACATCCATCCATCCATC | 4587 | GATGGATGGATGGATGTATAGGC |
| 3325 | CTGCCTATACATCCATCCATCCA | 4589 | TGGATGGATGGATGTATAGGCAG |
| 3326 | TCTGCCTATACATCCATCCATCC | 4590 | GGATGGATGGATGTATAGGCAGA |
| 3327 | ATCTGCCTATACATCCATCCATC | 4591 | GATGGATGGATGTATAGGCAGAT |
| 3328 | CATCTGCCTATACATCCATCCAT | 4592 | ATGGATGGATGTATAGGCAGATG |
| 3329 | CCATCTGCCTATACATCCATCCA | 4593 | TGGATGGATGTATAGGCAGATGG |
| 3330 | TCCATCTGCCTATACATCCATCC | 4594 | GGATGGATGTATAGGCAGATGGA |
| 3331 | GTCCATCTGCCTATACATCCATC | 4595 | GATGGATGTATAGGCAGATGGAC |
| 3332 | TGTCCATCTGCCTATACATCCAT | 4596 | ATGGATGTATAGGCAGATGGACA |
| 3333 | TTGTCCATCTGCCTATACATCCA | 4597 | TGGATGTATAGGCAGATGGACAA |
| 3334 | TTTGTCCATCTGCCTATACATCC | 4598 | GGATGTATAGGCAGATGGACAAA |
| 3335 | ATTTGTCCATCTGCCTATACATC | 4599 | GATGTATAGGCAGATGGACAAAT |
| 3336 | CATTTGTCCATCTGCCTATACAT | 4600 | ATGTATAGGCAGATGGACAAATG |
| 3337 | CCATTTGTCCATCTGCCTATACA | 4601 | TGTATAGGCAGATGGACAAATGG |
| 3338 | TCCATTTGTCCATCTGCCTATAC | 4602 | GTATAGGCAGATGGACAAATGGA |
| 3339 | ATCCATTTGTCCATCTGCCTATA | 4603 | TATAGGCAGATGGACAAATGGAT |
| 3340 | CATCCATTTGTCCATCTGCCTAT | 4604 | ATAGGCAGATGGACAAATGGATG |
| 3341 | TCATCCATTTGTCCATCTGCCTA | 4605 | TAGGCAGATGGACAAATGGATGA |
| 3342 | TTCATCCATTTGTCCATCTGCCT | 4606 | AGGCAGATGGACAAATGGATGAA |
| 3343 | ATTCATCCATTTGTCCATCTGCC | 4607 | GGCAGATGGACAAATGGATGAAT |
| 3344 | CATTCATCCATTTGTCCATCTGC | 4608 | GCAGATGGACAAATGGATGAATG |
| 3345 | CCATTCATCCATTTGTCCATCTG | 4609 | CAGATGGACAAATGGATGAATGG |
| 3346 | CCCATTCATCCATTTGTCCATCT | 4610 | AGATGGACAAATGGATGAATGGG |
| 3347 | ACCCATTCATCCATTTGTCCATC | 4611 | GATGGACAAATGGATGAATGGGT |
| 3348 | CACCCATTCATCCATTTGTCCAT | 4612 | ATGGACAAATGGATGAATGGGTG |
| 3349 | CCACCCATTCATCCATTTGTCCA | 4613 | TGGACAAATGGATGAATGGGTGG |
| 3350 | CCCACCCATTCATCCATTTGTCC | 4614 | GGACAAATGGATGAATGGGTGGG |
| 3351 | ACCCACCCATTCATCCATTTGTC | 4615 | GACAAATGGATGAATGGGTGGGT |
| 3352 | CACCCACCCATTCATCCATTTGT | 4616 | ACAAATGGATGAATGGGTGGGTG |
| 3353 | CCACCCACCCATTCATCCATTTG | 4617 | CAAATGGATGAATGGGTGGGTGG |
| 3354 | TCCACCCACCCATTCATCCATTT | 4618 | AAATGGATGAATGGGTGGGTGGA |
| 3355 | ATCCACCCACCCATTCATCCATT | 4619 | AATGGATGAATGGGTGGGTGGAT |
| 3356 | CATCCACCCACCCATTCATCCAT | 4620 | ATGGATGAATGGGTGGGTGGATG |
| 335″ | TCATCCACCCACCCATTCATCCA | 4621 | TGGATGAATGGGTGGGTGGATGA |
| 3358 | TTCATCCACCCACCCATTCATCC | 4622 | GGATGAATGGGTGGGTGGATGAA |
| 3359 | ATTCATCCACCCACCCATTCATC | 4623 | GATGAATGGGTGGGTGGATGAAT |
| 3360 | CATTCATCCACCCACCCATTCAT | 4624 | ATGAATGGGTGGGTGGATGAATG |
| 3361 | CCATTCATCCACCCACCCATTCA | 4625 | TGAATGGGTGGGTGGATGAATGG |
| 3362 | TCCATTCATCCACCCACCCATTC | 4626 | GAATGGGTGGGTGGATGAATGGA |
| 3363 | TTCCATTCATCCACCCACCCATT | 4627 | AATGGGTGGGTGGATGAATGGAA |
| 3364 | CTTCCATTCATCCACCCACCCAT | 4628 | ATGGGTGGGTGGATGAATGGAAG |
| 3365 | CCTTCCATTCATCCACCCACCCA | 4629 | TGGGTGGGTGGATGAATGGAAGG |
| 3366 | TCCTTCCATTCATCCACCCACCC | 4630 | GGGTGGGTGGATGAATGGAAGGA |
| 3368 | CATCCTTCCATTCATCCACCCAC | 4632 | GTGGGTGGATGAATGGAAGGATG |
| 3369 | ACATCCTTCCATTCATCCACCCA | 4633 | TGGGTGGATGAATGGAAGGATGT |
| 3370 | CACATCCTTCCATTCATCCACCC | 4634 | GGGTGGATGAATGGAAGGATGTG |
| 3371 | ACACATCCTTCCATTCATCCACC | 4635 | GGTGGATGAATGGAAGGATGTGT |
| 3372 | CACACATCCTTCCATTCATCCAC | 4636 | GTGGATGAATGGAAGGATGTGTG |
| 3373 | CCACACATCCTTCCATTCATCCA | 4637 | TGGATGAATGGAAGGATGTGTGG |
| 3374 | ACCACACATCCTTCCATTCATCC | 4638 | GGATGAATGGAAGGATGTGTGGT |
| 3375 | AACCACACATCCTTCCATTCATC | 4639 | GATGAATGGAAGGATGTGTGGTT |
| 3376 | CAACCACACATCCTTCCATTCAT | 4640 | ATGAATGGAAGGATGTGTGGTTG |
| 3377 | TCAACCACACATCCTTCCATTCA | 4641 | TGAATGGAAGGATGTGTGGTTGA |
| 3378 | TTCAACCACACATCCTTCCATTC | 4642 | GAATGGAAGGATGTGTGGTTGAA |
| 3379 | GTTCAACCACACATCCTTCCATT | 4643 | AATGGAAGGATGTGTGGTTGAAC |
| 3380 | AGTTCAACCACACATCCTTCCAT | 4644 | ATGGAAGGATGTGTGGTTGAACT |
| 3381 | TAGTTCAACCACACATCCTTCCA | 4645 | TGGAAGGATGTGTGGTTGAACTA |
| 3382 | ATAGTTCAACCACACATCCTTCC | 4646 | GGAAGGATGTGTGGTTGAACTAT |
| 3383 | AATAGTTCAACCACACATCCTTC | 4647 | GAAGGATGTGTGGTTGAACTATT |
| 3384 | CAATAGTTCAACCACACATCCTT | 4648 | AAGGATGTGTGGTTGAACTATTG |
| 3385 | GCAATAGTTCAACCACACATCCT | 4649 | AGGATGTGTGGTTGAACTATTGC |
| 3386 | TGCAATAGTTCAACCACACATCC | 4650 | GGATGTGTGGTTGAACTATTGCA |
| 3387 | TTGCAATAGTTCAACCACACATC | 4651 | GATGTGTGGTTGAACTATTGCAA |
| 3388 | CTTGCAATAGTTCAACCACACAT | 4652 | ATGTGTGGTTGAACTATTGCAAG |
| 3389 | ACTTGCAATAGTTCAACCACACA | 4653 | TGTGTGGTTGAACTATTGCAAGT |
| 3390 | TACTTGCAATAGTTCAACCACAC | 4654 | GTGTGGTTGAACTATTGCAAGTA |
| 3391 | ATACTTGCAATAGTTCAACCACA | 4655 | TGTGGTTGAACTATTGCAAGTAT |
| 3392 | AATACTTGCAATAGTTCAACCAC | 4656 | GTGGTTGAACTATTGCAAGTATT |
| 3393 | CAATACTTGCAATAGTTCAACCA | 4657 | TGGTTGAACTATTGCAAGTATTG |
| 3394 | TCAATACTTGCAATAGTTCAACC | 4658 | GGTTGAACTATTGCAAGTATTGA |
| 3395 | ATCAATACTTGCAATAGTTCAAC | 4659 | GTTGAACTATTGCAAGTATTGAT |
| 3396 | TATCAATACTTGCAATAGTTCAA | 4660 | TTGAACTATTGCAAGTATTGATA |
| 3397 | TTATCAATACTTGCAATAGTTCA | 4661 | TGAACTATTGCAAGTATTGATAA |
| 3398 | ATTATCAATACTTGCAATAGTTC | 4662 | GAACTATTGCAAGTATTGATAAT |
| 3399 | AATTATCAATACTTGCAATAGTT | 4663 | AACTATTGCAAGTATTGATAATT |
| 3400 | CAATTATCAATACTTGCAATAGT | 4664 | ACTATTGCAAGTATTGATAATTG |
| 3401 | CCAATTATCAATACTTGCAATAG | 4665 | CTATTGCAAGTATTGATAATTGG |
| 3402 | CCCAATTATCAATACTTGCAATA | 4666 | TATTGCAAGTATTGATAATTGGG |
| 3403 | ACCCAATTATCAATACTTGCAAT | 4667 | ATTGCAAGTATTGATAATTGGGT |
| 3404 | AACCCAATTATCAATACTTGCAA | 4668 | TTGCAAGTATTGATAATTGGGTT |
| 3405 | GAACCCAATTATCAATACTTGCA | 4669 | TGCAAGTATTGATAATTGGGTTC |
| 3406 | TGAACCCAATTATCAATACTTGC | 4670 | GCAAGTATTGATAATTGGGTTCA |
| 3407 | ATGAACCCAATTATCAATACTTG | 4671 | CAAGTATTGATAATTGGGTTCAT |
| 3408 | TATGAACCCAATTATCAATACTT | 4672 | AAGTATTGATAATTGGGTTCATA |
| 3409 | TTATGAACCCAATTATCAATACT | 4673 | AGTATTGATAATTGGGTTCATAA |
| 3410 | ATTATGAACCCAATTATCAATAC | 4674 | GTATTGATAATTGGGTTCATAAT |
| 3411 | AATTATGAACCCAATTATCAATA | 4675 | TATTGATAATTGGGTTCATAATT |
| 3412 | AAATTATGAACCCAATTATCAAT | 4676 | ATTGATAATTGGGTTCATAATTT |
| 3413 | GAAATTATGAACCCAATTATCAA | 4677 | TTGATAATTGGGTTCATAATTTC |
| 3414 | AGAAATTATGAACCCAATTATCA | 4678 | TGATAATTGGGTTCATAATTTCT |
| 3415 | CAGAAATTATGAACCCAATTATC | 4679 | GATAATTGGGTTCATAATTTCTG |
| 3416 | TCAGAAATTATGAACCCAATTAT | 4680 | ATAATTGGGTTCATAATTTCTGA |
| 3417 | TTCAGAAATTATGAACCCAATTA | 4681 | TAATTGGGTTCATAATTTCTGAA |
| 3418 | ATTCAGAAATTATGAACCCAATT | 4682 | AATTGGGTTCATAATTTCTGAAT |
| 3419 | TATTCAGAAATTATGAACCCAAT | 4683 | ATTGGGTTCATAATTTCTGAATA |
| 3420 | ATATTCAGAAATTATGAACCCAA | 4684 | TTGGGTTCATAATTTCTGAATAT |
| 3421 | AATATTCAGAAATTATGAACCCA | 4685 | TGGGTTCATAATTTCTGAATATT |
| 3422 | AAATATTCAGAAATTATGAACCC | 4686 | GGGTTCATAATTTCTGAATATTT |
| 3423 | TAAATATTCAGAAATTATGAACC | 4687 | GGTTCATAATTTCTGAATATTTA |
| 3424 | CTAAATATTCAGAAATTATGAAC | 4688 | GTTCATAATTTCTGAATATTTAG |
| 3425 | TCTAAATATTCAGAAATTATGAA | 4689 | TTCATAATTTCTGAATATTTAGA |
| 3426 | ATCTAAATATTCAGAAATTATGA | 4690 | TCATAATTTCTGAATATTTAGAT |
| 3427 | CATCTAAATATTCAGAAATTATG | 4691 | CATAATTTCTGAATATTTAGATG |
| 3428 | CCATCTAAATATTCAGAAATTAT | 4692 | ATAATTTCTGAATATTTAGATGG |
| 3429 | TCCATCTAAATATTCAGAAATTA | 4693 | TAATTTCTGAATATTTAGATGGA |
| 3430 | ATCCATCTAAATATTCAGAAATT | 4694 | AATTTCTGAATATTTAGATGGAT |
| 3431 | CATCCATCTAAATATTCAGAAAT | 4695 | ATTTCTGAATATTTAGATGGATG |
| 3432 | CCATCCATCTAAATATTCAGAAA | 4696 | TTTCTGAATATTTAGATGGATGG |
| 3433 | ACCATCCATCTAAATATTCAGAA | 4697 | TTCTGAATATTTAGATGGATGGT |
| 3434 | AACCATCCATCTAAATATTCAGA | 4698 | TCTGAATATTTAGATGGATGGTT |
| 3435 | CAACCATCCATCTAAATATTCAG | 4699 | CTGAATATTTAGATGGATGGTTG |
| 3436 | ACAACCATCCATCTAAATATTCA | 4700 | TGAATATTTAGATGGATGGTTGT |
| 3437 | CACAACCATCCATCTAAATATTC | 4701 | GAATATTTAGATGGATGGTTGTG |
| 3438 | TCACAACCATCCATCTAAATATT | 4702 | AATATTTAGATGGATGGTTGTGA |
| 3439 | CTCACAACCATCCATCTAAATAT | 4703 | ATATTTAGATGGATGGTTGTGAG |
| 3440 | ACTCACAACCATCCATCTAAATA | 4704 | TATTTAGATGGATGGTTGTGAGT |
| 3441 | CACTCACAACCATCCATCTAAAT | 4705 | ATTTAGATGGATGGTTGTGAGTG |
| 3442 | CCACTCACAACCATCCATCTAAA | 4706 | TTTAGATGGATGGTTGTGAGTGG |
| 3443 | GCCACTCACAACCATCCATCTAA | 4707 | TTAGATGGATGGTTGTGAGTGGC |
| 3444 | AGCCACTCACAACCATCCATCTA | 4708 | TAGATGGATGGTTGTGAGTGGCT |
| 3445 | CAGCCACTCACAACCATCCATCT | 4709 | AGATGGATGGTTGTGAGTGGCTG |
| 3446 | CCAGCCACTCACAACCATCCATC | 4710 | GATGGATGGTTGTGAGTGGCTGG |
| 3447 | ACCAGCCACTCACAACCATCCAT | 4711 | ATGGATGGTTGTGAGTGGCTGGT |
| 3448 | CACCAGCCACTCACAACCATCCA | 4712 | TGGATGGTTGTGAGTGGCTGGTG |
| 3449 | CCACCAGCCACTCACAACCATCC | 4713 | GGATGGTTGTGAGTGGCTGGTGG |
| 3450 | TCCACCAGCCACTCACAACCATC | 4714 | GATGGTTGTGAGTGGCTGGTGGA |
| 3451 | GTCCACCAGCCACTCACAACCAT | 4715 | ATGGTTGTGAGTGGCTGGTGGAC |
| 3452 | TGTCCACCAGCCACTCACAACCA | 4716 | TGGTTGTGAGTGGCTGGTGGACA |
| 3454 | TCTGTCCACCAGCCACTCACAAC | 4718 | GTTGTGAGTGGCTGGTGGACAGA |
| 3455 | GTCTGTCCACCAGCCACTCACAA | 4719 | TTGTGAGTGGCTGGTGGACAGAC |
| 3456 | CGTCTGTCCACCAGCCACTCACA | 4720 | TGTGAGTGGCTGGTGGACAGACG |
| 3457 | TCGTCTGTCCACCAGCCACTCAC | 4721 | GTGAGTGGCTGGTGGACAGACGA |
| 3458 | TTCGTCTGTCCACCAGCCACTCA | 4722 | TGAGTGGCTGGTGGACAGACGAA |
| 3459 | TTTCGTCTGTCCACCAGCCACTC | 4723 | GAGTGGCTGGTGGACAGACGAAA |
| 3460 | TTTTCGTCTGTCCACCAGCCACT | 4724 | AGTGGCTGGTGGACAGACGAAAA |
| 3461 | TTTTTCGTCTGTCCACCAGCCAC | 4725 | GTGGCTGGTGGACAGACGAAAAA |
| 3462 | ATTTTTCGTCTGTCCACCAGCCA | 4726 | TGGCTGGTGGACAGACGAAAAAT |
| 3463 | CATTTTTCGTCTGTCCACCAGCC | 4727 | GGCTGGTGGACAGACGAAAAATG |
| 3464 | CCATTTTTCGTCTGTCCACCAGC | 4728 | GCTGGTGGACAGACGAAAAATGG |
| 3465 | TCCATTTTTCGTCTGTCCACCAG | 4729 | CTGGTGGACAGACGAAAAATGGA |
| 3466 | ATCCATTTTTCGTCTGTCCACCA | 4730 | TGGTGGACAGACGAAAAATGGAT |
| 3467 | CATCCATTTTTCGTCTGTCCACC | 4731 | GGTGGACAGACGAAAAATGGATG |
| 3468 | CCATCCATTTTTCGTCTGTCCAC | 4732 | GTGGACAGACGAAAAATGGATGG |
| 3469 | ACCATCCATTTTTCGTCTGTCCA | 4733 | TGGACAGACGAAAAATGGATGGT |
| 3470 | AACCATCCATTTTTCGTCTGTCC | 4734 | GGACAGACGAAAAATGGATGGTT |
| 3471 | CAACCATCCATTTTTCGTCTGTC | 4735 | GACAGACGAAAAATGGATGGTTG |
| 3472 | CCAACCATCCATTTTTCGTCTGT | 4736 | ACAGACGAAAAATGGATGGTTGG |
| 3473 | TCCAACCATCCATTTTTCGTCTG | 4737 | CAGACGAAAAATGGATGGTTGGA |
| 3474 | ATCCAACCATCCATTTTTCGTCT | 4738 | AGACGAAAAATGGATGGTTGGAT |
| 3475 | TATCCAACCATCCATTTTTCGTC | 4739 | GACGAAAAATGGATGGTTGGATA |
| 3476 | TTATCCAACCATCCATTTTTCGT | 4740 | ACGAAAAATGGATGGTTGGATAA |
| 3477 | TTTATCCAACCATCCATTTTTCG | 4741 | CGAAAAATGGATGGTTGGATAAA |
| 3478 | ATTTATCCAACCATCCATTTTTC | 4742 | GAAAAATGGATGGTTGGATAAAT |
| 3479 | AATTTATCCAACCATCCATTTTT | 4743 | AAAAATGGATGGTTGGATAAATT |
| 3480 | CAATTTATCCAACCATCCATTTT | 4744 | AAAATGGATGGTTGGATAAATTG |
| 3481 | TCAATTTATCCAACCATCCATTT | 4745 | AAATGGATGGTTGGATAAATTGA |
| 3482 | ATCAATTTATCCAACCATCCATT | 4746 | AATGGATGGTTGGATAAATTGAT |
| 3483 | CATCAATTTATCCAACCATCCAT | 4747 | ATGGATGGTTGGATAAATTGATG |
| 3484 | CCATCAATTTATCCAACCATCCA | 4748 | TGGATGGTTGGATAAATTGATGG |
| 3485 | CCCATCAATTTATCCAACCATCC | 4749 | GGATGGTTGGATAAATTGATGGG |
| 3486 | ACCCATCAATTTATCCAACCATC | 4750 | GATGGTTGGATAAATTGATGGGT |
| 3487 | CACCCATCAATTTATCCAACCAT | 4751 | ATGGTTGGATAAATTGATGGGTG |
| 3488 | CCACCCATCAATTTATCCAACCA | 4752 | TGGTTGGATAAATTGATGGGTGG |
| 3489 | TCCACCCATCAATTTATCCAACC | 4753 | GGTTGGATAAATTGATGGGTGGA |
| 3490 | ATCCACCCATCAATTTATCCAAC | 4754 | GTTGGATAAATTGATGGGTGGAT |
| 3491 | CATCCACCCATCAATTTATCCAA | 4755 | TTGGATAAATTGATGGGTGGATG |
| 3492 | CCATCCACCCATCAATTTATCCA | 4756 | TGGATAAATTGATGGGTGGATGG |
| 3493 | TCCATCCACCCATCAATTTATCC | 4757 | GGATAAATTGATGGGTGGATGGA |
| 3494 | ATCCATCCACCCATCAATTTATC | 4758 | GATAAATTGATGGGTGGATGGAT |
| 3495 | CATCCATCCACCCATCAATTTAT | 4759 | ATAAATTGATGGGTGGATGGATG |
| 3497 | ACCATCCATCCACCCATCAATTT | 4761 | AAATTGATGGGTGGATGGATGGT |
| 3498 | AACCATCCATCCACCCATCAATT | 4762 | AATTGATGGGTGGATGGATGGTT |
| 3499 | CAACCATCCATCCACCCATCAAT | 4763 | ATTGATGGGTGGATGGATGGTTG |
| 3500 | CCAACCATCCATCCACCCATCAA | 4764 | TTGATGGGTGGATGGATGGTTGG |
| 3501 | ACCAACCATCCATCCACCCATCA | 4765 | TGATGGGTGGATGGATGGTTGGT |
| 3502 | AACCAACCATCCATCCACCCATC | 4766 | GATGGGTGGATGGATGGTTGGTT |
| 3503 | CAACCAACCATCCATCCACCCAT | 4767 | ATGGGTGGATGGATGGTTGGTTG |
| 3504 | ACAACCAACCATCCATCCACCCA | 4768 | TGGGTGGATGGATGGTTGGTTGT |
| 3505 | TACAACCAACCATCCATCCACCC | 4769 | GGGTGGATGGATGGTTGGTTGTA |
| 3506 | ATACAACCAACCATCCATCCACC | 4770 | GGTGGATGGATGGTTGGTTGTAT |
| 3507 | CATACAACCAACCATCCATCCAC | 4771 | GTGGATGGATGGTTGGTTGTATG |
| 3508 | TCATACAACCAACCATCCATCCA | 4772 | TGGATGGATGGTTGGTTGTATGA |
| 3509 | TTCATACAACCAACCATCCATCC | 4773 | GGATGGATGGTTGGTTGTATGAA |
| 3510 | TTTCATACAACCAACCATCCATC | 4774 | GATGGATGGTTGGTTGTATGAAA |
| 3511 | CTTTCATACAACCAACCATCCAT | 4775 | ATGGATGGTTGGTTGTATGAAAG |
| 3512 | TCTTTCATACAACCAACCATCCA | 4776 | TGGATGGTTGGTTGTATGAAAGA |
| 3513 | TTCTTTCATACAACCAACCATCC | 4777 | GGATGGTTGGTTGTATGAAAGAA |
| 3514 | ATTCTTTCATACAACCAACCATC | 4778 | GATGGTTGGTTGTATGAAAGAAT |
| 3515 | CATTCTTTCATACAACCAACCAT | 4779 | ATGGTTGGTTGTATGAAAGAATG |
| 3516 | TCATTCTTTCATACAACCAACCA | 4780 | TGGTTGGTTGTATGAAAGAATGA |
| 3517 | TTCATTCTTTCATACAACCAACC | 4781 | GGTTGGTTGTATGAAAGAATGAA |
| 3518 | ATTCATTCTTTCATACAACCAAC | 4782 | GTTGGTTGTATGAAAGAATGAAT |
| 3519 | CATTCATTCTTTCATACAACCAA | 4783 | TTGGTTGTATGAAAGAATGAATG |
| 3520 | TCATTCATTCTTTCATACAACCA | 4784 | TGGTTGTATGAAAGAATGAATGA |
| 3521 | ATCATTCATTCTTTCATACAACC | 4785 | GGTTGTATGAAAGAATGAATGAT |
| 3522 | AATCATTCATTCTTTCATACAAC | 4786 | GTTGTATGAAAGAATGAATGATT |
| 3523 | CAATCATTCATTCTTTCATACAA | 4787 | TTGTATGAAAGAATGAATGATTG |
| 3524 | CCAATCATTCATTCTTTCATACA | 4788 | TGTATGAAAGAATGAATGATTGG |
| 3525 | CCCAATCATTCATTCTTTCATAC | 4789 | GTATGAAAGAATGAATGATTGGG |
| 3526 | ACCCAATCATTCATTCTTTCATA | 4790 | TATGAAAGAATGAATGATTGGGT |
| 3527 | TACCCAATCATTCATTCTTTCAT | 4791 | ATGAAAGAATGAATGATTGGGTA |
| 3528 | CTACCCAATCATTCATTCTTTCA | 4792 | TGAAAGAATGAATGATTGGGTAG |
| 3529 | CCTACCCAATCATTCATTCTTTC | 4793 | GAAAGAATGAATGATTGGGTAGG |
| 3530 | ACCTACCCAATCATTCATTCTTT | 4794 | AAAGAATGAATGATTGGGTAGGT |
| 3531 | CACCTACCCAATCATTCATTCTT | 4795 | AAGAATGAATGATTGGGTAGGTG |
| 3532 | CCACCTACCCAATCATTCATTCT | 4796 | AGAATGAATGATTGGGTAGGTGG |
| 3533 | TCCACCTACCCAATCATTCATTC | 4797 | GAATGAATGATTGGGTAGGTGGA |
| 3534 | ATCCACCTACCCAATCATTCATT | 4798 | AATGAATGATTGGGTAGGTGGAT |
| 3535 | AATCCACCTACCCAATCATTCAT | 4799 | ATGAATGATTGGGTAGGTGGATT |
| 3536 | TAATCCACCTACCCAATCATTCA | 4800 | TGAATGATTGGGTAGGTGGATTA |
| 3537 | TTAATCCACCTACCCAATCATTC | 4801 | GAATGATTGGGTAGGTGGATTAA |
| 3538 | CTTAATCCACCTACCCAATCATT | 4802 | AATGATTGGGTAGGTGGATTAAG |
| 3540 | AACTTAATCCACCTACCCAATCA | 4804 | TGATTGGGTAGGTGGATTAAGTT |
| 3541 | CAACTTAATCCACCTACCCAATC | 4805 | GATTGGGTAGGTGGATTAAGTTG |
| 3542 | GCAACTTAATCCACCTACCCAAT | 4806 | ATTGGGTAGGTGGATTAAGTTGC |
| 3543 | CGCAACTTAATCCACCTACCCAA | 4807 | TTGGGTAGGTGGATTAAGTTGCG |
| 3544 | CCGCAACTTAATCCACCTACCCA | 4808 | TGGGTAGGTGGATTAAGTTGCGG |
| 3545 | TCCGCAACTTAATCCACCTACCC | 4809 | GGGTAGGTGGATTAAGTTGCGGA |
| 3546 | ATCCGCAACTTAATCCACCTACC | 4810 | GGTAGGTGGATTAAGTTGCGGAT |
| 3547 | GATCCGCAACTTAATCCACCTAC | 4811 | GTAGGTGGATTAAGTTGCGGATC |
| 3548 | TGATCCGCAACTTAATCCACCTA | 4812 | TAGGTGGATTAAGTTGCGGATCA |
| 3549 | TTGATCCGCAACTTAATCCACCT | 4813 | AGGTGGATTAAGTTGCGGATCAA |
| 3550 | ATTGATCCGCAACTTAATCCACC | 4814 | GGTGGATTAAGTTGCGGATCAAT |
| 3551 | CATTGATCCGCAACTTAATCCAC | 4815 | GTGGATTAAGTTGCGGATCAATG |
| 3552 | ACATTGATCCGCAACTTAATCCA | 4816 | TGGATTAAGTTGCGGATCAATGT |
| 3553 | TACATTGATCCGCAACTTAATCC | 4817 | GGATTAAGTTGCGGATCAATGTA |
| 3554 | ATACATTGATCCGCAACTTAATC | 4818 | GATTAAGTTGCGGATCAATGTAT |
| 3555 | CATACATTGATCCGCAACTTAAT | 4819 | ATTAAGTTGCGGATCAATGTATG |
| 3556 | CCATACATTGATCCGCAACTTAA | 4820 | TTAAGTTGCGGATCAATGTATGG |
| 3557 | CCCATACATTGATCCGCAACTTA | 4821 | TAAGTTGCGGATCAATGTATGGG |
| 3558 | TCCCATACATTGATCCGCAACTT | 4822 | AAGTTGCGGATCAATGTATGGGA |
| 3559 | ATCCCATACATTGATCCGCAACT | 4823 | AGTTGCGGATCAATGTATGGGAT |
| 3560 | CATCCCATACATTGATCCGCAAC | 4824 | GTTGCGGATCAATGTATGGGATG |
| 3561 | CCATCCCATACATTGATCCGCAA | 4825 | TTGCGGATCAATGTATGGGATGG |
| 3562 | TCCATCCCATACATTGATCCGCA | 4826 | TGCGGATCAATGTATGGGATGGA |
| 3563 | ATCCATCCCATACATTGATCCGC | 4827 | GCGGATCAATGTATGGGATGGAT |
| 3564 | CATCCATCCCATACATTGATCCG | 4828 | CGGATCAATGTATGGGATGGATG |
| 3565 | TCATCCATCCCATACATTGATCC | 4829 | GGATCAATGTATGGGATGGATGA |
| 3566 | TTCATCCATCCCATACATTGATC | 4830 | GATCAATGTATGGGATGGATGAA |
| 3567 | ATTCATCCATCCCATACATTGAT | 4831 | ATCAATGTATGGGATGGATGAAT |
| 3568 | CATTCATCCATCCCATACATTGA | 4832 | TCAATGTATGGGATGGATGAATG |
| 3569 | CCATTCATCCATCCCATACATTG | 4833 | CAATGTATGGGATGGATGAATGG |
| 3570 | TCCATTCATCCATCCCATACATT | 4834 | AATGTATGGGATGGATGAATGGA |
| 3571 | ATCCATTCATCCATCCCATACAT | 4835 | ATGTATGGGATGGATGAATGGAT |
| 3572 | CATCCATTCATCCATCCCATACA | 4836 | TGTATGGGATGGATGAATGGATG |
| 3573 | CCATCCATTCATCCATCCCATAC | 4837 | GTATGGGATGGATGAATGGATGG |
| 3574 | TCCATCCATTCATCCATCCCATA | 4838 | TATGGGATGGATGAATGGATGGA |
| 3575 | ATCCATCCATTCATCCATCCCAT | 4839 | ATGGGATGGATGAATGGATGGAT |
| 3576 | CATCCATCCATTCATCCATCCCA | 4840 | TGGGATGGATGAATGGATGGATG |
| 3577 | CCATCCATCCATTCATCCATCCC | 4841 | GGGATGGATGAATGGATGGATGG |
| 3578 | TCCATCCATCCATTCATCCATCC | 4842 | GGATGGATGAATGGATGGATGGA |
| 3579 | ATCCATCCATCCATTCATCCATC | 4843 | GATGGATGAATGGATGGATGGAT |
| 3580 | CATCCATCCATCCATTCATCCAT | 4844 | ATGGATGAATGGATGGATGGATG |
| 3581 | CCATCCATCCATCCATTCATCCA | 4845 | TGGATGAATGGATGGATGGATGG |
| 3583 | ATCCATCCATCCATCCATTCATC | 4847 | GATGAATGGATGGATGGATGGAT |
| 3584 | CATCCATCCATCCATCCATTCAT | 4848 | ATGAATGGATGGATGGATGGATG |
| 3585 | ACATCCATCCATCCATCCATTCA | 4849 | TGAATGGATGGATGGATGGATGT |
| 3586 | CACATCCATCCATCCATCCATTC | 4850 | GAATGGATGGATGGATGGATGTG |
| 3587 | ACACATCCATCCATCCATCCATT | 4851 | AATGGATGGATGGATGGATGTGT |
| 3588 | CACACATCCATCCATCCATCCAT | 4852 | ATGGATGGATGGATGGATGTGTG |
| 3589 | CCACACATCCATCCATCCATCCA | 4853 | TGGATGGATGGATGGATGTGTGG |
| 3590 | ACCACACATCCATCCATCCATCC | 4854 | GGATGGATGGATGGATGTGTGGT |
| 3591 | AACCACACATCCATCCATCCATC | 4855 | GATGGATGGATGGATGTGTGGTT |
| 3592 | CAACCACACATCCATCCATCCAT | 4856 | ATGGATGGATGGATGTGTGGTTG |
| 3593 | TCAACCACACATCCATCCATCCA | 4857 | TGGATGGATGGATGTGTGGTTGA |
| 3594 | TTCAACCACACATCCATCCATCC | 4858 | GGATGGATGGATGTGTGGTTGAA |
| 3595 | ATTCAACCACACATCCATCCATC | 4859 | GATGGATGGATGTGTGGTTGAAT |
| 3596 | AATTCAACCACACATCCATCCAT | 4860 | ATGGATGGATGTGTGGTTGAATT |
| 3597 | TAATTCAACCACACATCCATCCA | 4861 | TGGATGGATGTGTGGTTGAATTA |
| 3598 | GTAATTCAACCACACATCCATCC | 4862 | GGATGGATGTGTGGTTGAATTAC |
| 3599 | AGTAATTCAACCACACATCCATC | 4863 | GATGGATGTGTGGTTGAATTACT |
| 3600 | CAGTAATTCAACCACACATCCAT | 4864 | ATGGATGTGTGGTTGAATTACTG |
| 3601 | TCAGTAATTCAACCACACATCCA | 4865 | TGGATGTGTGGTTGAATTACTGA |
| 3602 | TTCAGTAATTCAACCACACATCC | 4866 | GGATGTGTGGTTGAATTACTGAA |
| 3603 | TTTCAGTAATTCAACCACACATC | 4867 | GATGTGTGGTTGAATTACTGAAA |
| 3604 | CTTTCAGTAATTCAACCACACAT | 4868 | ATGTGTGGTTGAATTACTGAAAG |
| 3605 | CCTTTCAGTAATTCAACCACACA | 4869 | TGTGTGGTTGAATTACTGAAAGG |
| 3606 | ACCTTTCAGTAATTCAACCACAC | 4870 | GTGTGGTTGAATTACTGAAAGGT |
| 3607 | AACCTTTCAGTAATTCAACCACA | 4871 | TGTGGTTGAATTACTGAAAGGTT |
| 3608 | CAACCTTTCAGTAATTCAACCAC | 4872 | GTGGTTGAATTACTGAAAGGTTG |
| 3609 | CCAACCTTTCAGTAATTCAACCA | 4873 | TGGTTGAATTACTGAAAGGTTGG |
| 3610 | TCCAACCTTTCAGTAATTCAACC | 4874 | GGTTGAATTACTGAAAGGTTGGA |
| 3611 | TTCCAACCTTTCAGTAATTCAAC | 4875 | GTTGAATTACTGAAAGGTTGGAA |
| 3612 | CTTCCAACCTTTCAGTAATTCAA | 4876 | TTGAATTACTGAAAGGTTGGAAG |
| 3613 | TCTTCCAACCTTTCAGTAATTCA | 4877 | TGAATTACTGAAAGGTTGGAAGA |
| 3614 | CTCTTCCAACCTTTCAGTAATTC | 4878 | GAATTACTGAAAGGTTGGAAGAG |
| 3615 | ACTCTTCCAACCTTTCAGTAATT | 4879 | AATTACTGAAAGGTTGGAAGAGT |
| 3616 | CACTCTTCCAACCTTTCAGTAAT | 4880 | ATTACTGAAAGGTTGGAAGAGTG |
| 3617 | CCACTCTTCCAACCTTTCAGTAA | 4881 | TTACTGAAAGGTTGGAAGAGTGG |
| 3618 | TCCACTCTTCCAACCTTTCAGTA | 4882 | TACTGAAAGGTTGGAAGAGTGGA |
| 3619 | ATCCACTCTTCCAACCTTTCAGT | 4883 | ACTGAAAGGTTGGAAGAGTGGAT |
| 3620 | CATCCACTCTTCCAACCTTTCAG | 4884 | CTGAAAGGTTGGAAGAGTGGATG |
| 3621 | CCATCCACTCTTCCAACCTTTCA | 4885 | TGAAAGGTTGGAAGAGTGGATGG |
| 3622 | CCCATCCACTCTTCCAACCTTTC | 4886 | GAAAGGTTGGAAGAGTGGATGGG |
| 3623 | ACCCATCCACTCTTCCAACCTTT | 4887 | AAAGGTTGGAAGAGTGGATGGGT |
| 3624 | CACCCATCCACTCTTCCAACCTT | 4888 | AAGGTTGGAAGAGTGGATGGGTG |
| 3626 | TTCACCCATCCACTCTTCCAACC | 4890 | GGTTGGAAGAGTGGATGGGTGAA |
| 3627 | TTTCACCCATCCACTCTTCCAAC | 4891 | GTTGGAAGAGTGGATGGGTGAAA |
| 3628 | ATTTCACCCATCCACTCTTCCAA | 4892 | TTGGAAGAGTGGATGGGTGAAAT |
| 3629 | AATTTCACCCATCCACTCTTCCA | 4893 | TGGAAGAGTGGATGGGTGAAATT |
| 3630 | AAATTTCACCCATCCACTCTTCC | 4894 | GGAAGAGTGGATGGGTGAAATTT |
| 3631 | CAAATTTCACCCATCCACTCTTC | 4895 | GAAGAGTGGATGGGTGAAATTTG |
| 3632 | CCAAATTTCACCCATCCACTCTT | 4896 | AAGAGTGGATGGGTGAAATTTGG |
| 3633 | CCCAAATTTCACCCATCCACTCT | 4897 | AGAGTGGATGGGTGAAATTTGGG |
| 3634 | CCCCAAATTTCACCCATCCACTC | 4898 | GAGTGGATGGGTGAAATTTGGGG |
| 3635 | ACCCCAAATTTCACCCATCCACT | 4899 | AGTGGATGGGTGAAATTTGGGGT |
| 3636 | TACCCCAAATTTCACCCATCCAC | 4900 | GTGGATGGGTGAAATTTGGGGTA |
| 3637 | CTACCCCAAATTTCACCCATCCA | 4901 | TGGATGGGTGAAATTTGGGGTAG |
| 3638 | ACTACCCCAAATTTCACCCATCC | 4902 | GGATGGGTGAAATTTGGGGTAGT |
| 3639 | AACTACCCCAAATTTCACCCATC | 4903 | GATGGGTGAAATTTGGGGTAGTT |
| 3640 | TAACTACCCCAAATTTCACCCAT | 4904 | ATGGGTGAAATTTGGGGTAGTTA |
| 3641 | CTAACTACCCCAAATTTCACCCA | 4905 | TGGGTGAAATTTGGGGTAGTTAG |
| 3642 | TCTAACTACCCCAAATTTCACCC | 4906 | GGGTGAAATTTGGGGTAGTTAGA |
| 3643 | ATCTAACTACCCCAAATTTCACC | 4907 | GGTGAAATTTGGGGTAGTTAGAT |
| 3644 | CATCTAACTACCCCAAATTTCAC | 4908 | GTGAAATTTGGGGTAGTTAGATG |
| 3645 | CCATCTAACTACCCCAAATTTCA | 4909 | TGAAATTTGGGGTAGTTAGATGG |
| 3646 | CCCATCTAACTACCCCAAATTTC | 4910 | GAAATTTGGGGTAGTTAGATGGG |
| 3647 | ACCCATCTAACTACCCCAAATTT | 4911 | AAATTTGGGGTAGTTAGATGGGT |
| 3648 | CACCCATCTAACTACCCCAAATT | 4912 | AATTTGGGGTAGTTAGATGGGTG |
| 3649 | CCACCCATCTAACTACCCCAAAT | 4913 | ATTTGGGGTAGTTAGATGGGTGG |
| 3650 | CCCACCCATCTAACTACCCCAAA | 4914 | TTTGGGGTAGTTAGATGGGTGGG |
| 3651 | ACCCACCCATCTAACTACCCCAA | 4915 | TTGGGGTAGTTAGATGGGTGGGT |
| 3652 | CACCCACCCATCTAACTACCCCA | 4916 | TGGGGTAGTTAGATGGGTGGGTG |
| 3653 | ACACCCACCCATCTAACTACCCC | 4917 | GGGGTAGTTAGATGGGTGGGTGT |
| 3654 | CACACCCACCCATCTAACTACCC | 4918 | GGGTAGTTAGATGGGTGGGTGTG |
| 3655 | ACACACCCACCCATCTAACTACC | 4919 | GGTAGTTAGATGGGTGGGTGTGT |
| 3656 | CACACACCCACCCATCTAACTAC | 4920 | GTAGTTAGATGGGTGGGTGTGTG |
| 3657 | CCACACACCCACCCATCTAACTA | 4921 | TAGTTAGATGGGTGGGTGTGTGG |
| 3658 | TCCACACACCCACCCATCTAACT | 4922 | AGTTAGATGGGTGGGTGTGTGGA |
| 3659 | ATCCACACACCCACCCATCTAAC | 4923 | GTTAGATGGGTGGGTGTGTGGAT |
| 3660 | CATCCACACACCCACCCATCTAA | 4924 | TTAGATGGGTGGGTGTGTGGATG |
| 3661 | CCATCCACACACCCACCCATCTA | 4925 | TAGATGGGTGGGTGTGTGGATGG |
| 3662 | TCCATCCACACACCCACCCATCT | 4926 | AGATGGGTGGGTGTGTGGATGGA |
| 3663 | ATCCATCCACACACCCACCCATC | 4927 | GATGGGTGGGTGTGTGGATGGAT |
| 3664 | TATCCATCCACACACCCACCCAT | 4928 | ATGGGTGGGTGTGTGGATGGATA |
| 3665 | TTATCCATCCACACACCCACCCA | 4929 | TGGGTGGGTGTGTGGATGGATAA |
| 3666 | TTTATCCATCCACACACCCACCC | 4930 | GGGTGGGTGTGTGGATGGATAAA |
| 3667 | TTTTATCCATCCACACACCCACC | 4931 | GGTGGGTGTGTGGATGGATAAAA |
| 3669 | TCTTTTATCCATCCACACACCCA | 4933 | TGGGTGTGTGGATGGATAAAAGA |
| 3670 | CTCTTTTATCCATCCACACACCC | 4934 | GGGTGTGTGGATGGATAAAAGAG |
| 3671 | ACTCTTTTATCCATCCACACACC | 4935 | GGTGTGTGGATGGATAAAAGAGT |
| 3672 | TACTCTTTTATCCATCCACACAC | 4936 | GTGTGTGGATGGATAAAAGAGTA |
| 3673 | CTACTCTTTTATCCATCCACACA | 4937 | TGTGTGGATGGATAAAAGAGTAG |
| 3674 | TCTACTCTTTTATCCATCCACAC | 4938 | GTGTGGATGGATAAAAGAGTAGA |
| 3675 | ATCTACTCTTTTATCCATCCACA | 4939 | TGTGGATGGATAAAAGAGTAGAT |
| 3676 | CATCTACTCTTTTATCCATCCAC | 4940 | GTGGATGGATAAAAGAGTAGATG |
| 3677 | TCATCTACTCTTTTATCCATCCA | 4941 | TGGATGGATAAAAGAGTAGATGA |
| 3678 | TTCATCTACTCTTTTATCCATCC | 4942 | GGATGGATAAAAGAGTAGATGAA |
| 3679 | ATTCATCTACTCTTTTATCCATC | 4943 | GATGGATAAAAGAGTAGATGAAT |
| 3680 | CATTCATCTACTCTTTTATCCAT | 4944 | ATGGATAAAAGAGTAGATGAATG |
| 3681 | TCATTCATCTACTCTTTTATCCA | 4945 | TGGATAAAAGAGTAGATGAATGA |
| 3682 | TTCATTCATCTACTCTTTTATCC | 4946 | GGATAAAAGAGTAGATGAATGAA |
| 3683 | ATTCATTCATCTACTCTTTTATC | 4947 | GATAAAAGAGTAGATGAATGAAT |
| 3684 | AATTCATTCATCTACTCTTTTAT | 4948 | ATAAAAGAGTAGATGAATGAATT |
| 3685 | TAATTCATTCATCTACTCTTTTA | 4949 | TAAAAGAGTAGATGAATGAATTA |
| 3686 | TTAATTCATTCATCTACTCTTTT | 4950 | AAAAGAGTAGATGAATGAATTAA |
| 3687 | ATTAATTCATTCATCTACTCTTT | 4951 | AAAGAGTAGATGAATGAATTAAT |
| 3688 | CATTAATTCATTCATCTACTCTT | 4952 | AAGAGTAGATGAATGAATTAATG |
| 3689 | TCATTAATTCATTCATCTACTCT | 4953 | AGAGTAGATGAATGAATTAATGA |
| 3690 | TTCATTAATTCATTCATCTACTC | 4954 | GAGTAGATGAATGAATTAATGAA |
| 3691 | ATTCATTAATTCATTCATCTACT | 4955 | AGTAGATGAATGAATTAATGAAT |
| 3692 | TATTCATTAATTCATTCATCTAC | 4956 | GTAGATGAATGAATTAATGAATA |
| 3693 | TTATTCATTAATTCATTCATCTA | 4957 | TAGATGAATGAATTAATGAATAA |
| 3694 | TTTATTCATTAATTCATTCATCT | 4958 | AGATGAATGAATTAATGAATAAA |
| 3695 | GTTTATTCATTAATTCATTCATC | 4959 | GATGAATGAATTAATGAATAAAC |
| 3696 | TGTTTATTCATTAATTCATTCAT | 4960 | ATGAATGAATTAATGAATAAACA |
| 3697 | CTGTTTATTCATTAATTCATTCA | 4961 | TGAATGAATTAATGAATAAACAG |
| 3698 | CCTGTTTATTCATTAATTCATTC | 4962 | GAATGAATTAATGAATAAACAGG |
| 3699 | GCCTGTTTATTCATTAATTCATT | 4963 | AATGAATTAATGAATAAACAGGC |
| 3700 | TGCCTGTTTATTCATTAATTCAT | 4964 | ATGAATTAATGAATAAACAGGCA |
| 3701 | CTGCCTGTTTATTCATTAATTCA | 4965 | TGAATTAATGAATAAACAGGCAG |
| 3702 | TCTGCCTGTTTATTCATTAATTC | 4966 | GAATTAATGAATAAACAGGCAGA |
| 3703 | ATCTGCCTGTTTATTCATTAATT | 4967 | AATTAATGAATAAACAGGCAGAT |
| 3704 | CATCTGCCTGTTTATTCATTAAT | 4968 | ATTAATGAATAAACAGGCAGATG |
| 3705 | CCATCTGCCTGTTTATTCATTAA | 4969 | TTAATGAATAAACAGGCAGATGG |
| 3706 | TCCATCTGCCTGTTTATTCATTA | 4970 | TAATGAATAAACAGGCAGATGGA |
| 3707 | ATCCATCTGCCTGTTTATTCATT | 4971 | AATGAATAAACAGGCAGATGGAT |
| 3708 | CATCCATCTGCCTGTTTATTCAT | 4972 | ATGAATAAACAGGCAGATGGATG |
| 3709 | TCATCCATCTGCCTGTTTATTCA | 4973 | TGAATAAACAGGCAGATGGATGA |
| 3710 | ATCATCCATCTGCCTGTTTATTC | 4974 | GAATAAACAGGCAGATGGATGAT |
| 3712 | ACATCATCCATCTGCCTGTTTAT | 4976 | ATAAACAGGCAGATGGATGATGT |
| 3713 | TACATCATCCATCTGCCTGTTTA | 4977 | TAAACAGGCAGATGGATGATGTA |
| 3714 | TTACATCATCCATCTGCCTGTTT | 4978 | AAACAGGCAGATGGATGATGTAA |
| 3715 | CTTACATCATCCATCTGCCTGTT | 4979 | AACAGGCAGATGGATGATGTAAG |
| 3716 | GCTTACATCATCCATCTGCCTGT | 4980 | ACAGGCAGATGGATGATGTAAGC |
| 3717 | AGCTTACATCATCCATCTGCCTG | 4981 | CAGGCAGATGGATGATGTAAGCT |
| 3718 | CAGCTTACATCATCCATCTGCCT | 4982 | AGGCAGATGGATGATGTAAGCTG |
| 3719 | GCAGCTTACATCATCCATCTGCC | 4983 | GGCAGATGGATGATGTAAGCTGC |
| 3720 | GGCAGCTTACATCATCCATCTGC | 4984 | GCAGATGGATGATGTAAGCTGCC |
| 3721 | GGGCAGCTTACATCATCCATCTG | 4985 | CAGATGGATGATGTAAGCTGCCC |
| 3722 | GGGGCAGCTTACATCATCCATCT | 4986 | AGATGGATGATGTAAGCTGCCCC |
| 3723 | TGGGGCAGCTTACATCATCCATC | 4987 | GATGGATGATGTAAGCTGCCCCA |
| 3724 | CTGGGGCAGCTTACATCATCCAT | 4988 | ATGGATGATGTAAGCTGCCCCAG |
| 3725 | TCTGGGGCAGCTTACATCATCCA | 4989 | TGGATGATGTAAGCTGCCCCAGA |
| 3726 | GTCTGGGGCAGCTTACATCATCC | 4990 | GGATGATGTAAGCTGCCCCAGAC |
| 3727 | GGTCTGGGGCAGCTTACATCATC | 4991 | GATGATGTAAGCTGCCCCAGACC |
| 3728 | GGGTCTGGGGCAGCTTACATCAT | 4992 | ATGATGTAAGCTGCCCCAGACCC |
| 3729 | AGGGTCTGGGGCAGCTTACATCA | 4993 | TGATGTAAGCTGCCCCAGACCCT |
| 3730 | CAGGGTCTGGGGCAGCTTACATC | 4994 | GATGTAAGCTGCCCCAGACCCTG |
| 3731 | CCAGGGTCTGGGGCAGCTTACAT | 4995 | ATGTAAGCTGCCCCAGACCCTGG |
| 3732 | CCCAGGGTCTGGGGCAGCTTACA | 4996 | TGTAAGCTGCCCCAGACCCTGGG |
| 3733 | TCCCAGGGTCTGGGGCAGCTTAC | 4997 | GTAAGCTGCCCCAGACCCTGGGA |
| 3734 | GTCCCAGGGTCTGGGGCAGCTTA | 4998 | TAAGCTGCCCCAGACCCTGGGAC |
| 3735 | GGTCCCAGGGTCTGGGGCAGCTT | 4999 | AAGCTGCCCCAGACCCTGGGACC |
| 3736 | AGGTCCCAGGGTCTGGGGCAGCT | 5000 | AGCTGCCCCAGACCCTGGGACCT |
| 3737 | GAGGTCCCAGGGTCTGGGGCAGC | 5001 | GCTGCCCCAGACCCTGGGACCTC |
| 3738 | AGAGGTCCCAGGGTCTGGGGCAG | 5002 | CTGCCCCAGACCCTGGGACCTCT |
| 3739 | CAGAGGTCCCAGGGTCTGGGGCA | 5003 | TGCCCCAGACCCTGGGACCTCTG |
| 3740 | TCAGAGGTCCCAGGGTCTGGGGC | 5004 | GCCCCAGACCCTGGGACCTCTGA |
| 3741 | GTCAGAGGTCCCAGGGTCTGGGG | 5005 | CCCCAGACCCTGGGACCTCTGAC |
| 3742 | GGTCAGAGGTCCCAGGGTCTGGG | 5006 | CCCAGACCCTGGGACCTCTGACC |
| 3743 | GGGTCAGAGGTCCCAGGGTCTGG | 5007 | CCAGACCCTGGGACCTCTGACCC |
| 3744 | GGGGTCAGAGGTCCCAGGGTCTG | 5008 | CAGACCCTGGGACCTCTGACCCC |
| 3745 | GGGGGTCAGAGGTCCCAGGGTCT | 5009 | AGACCCTGGGACCTCTGACCCCC |
| 3746 | CGGGGGTCAGAGGTCCCAGGGTC | 5010 | GACCCTGGGACCTCTGACCCCCG |
| 3747 | CCGGGGGTCAGAGGTCCCAGGGT | 5011 | ACCCTGGGACCTCTGACCCCCGG |
| 3748 | GCCGGGGGTCAGAGGTCCCAGGG | 5012 | CCCTGGGACCTCTGACCCCCGGC |
| 3749 | CGCCGGGGGTCAGAGGTCCCAGG | 5013 | CCTGGGACCTCTGACCCCCGGCG |
| 3750 | TCGCCGGGGGTCAGAGGTCCCAG | 5014 | CTGGGACCTCTGACCCCCGGCGA |
| 3751 | GTCGCCGGGGGTCAGAGGTCCCA | 5015 | TGGGACCTCTGACCCCCGGCGAC |
| 3752 | GGTCGCCGGGGGTCAGAGGTCCC | 5016 | GGGACCTCTGACCCCCGGCGACC |
| 3753 | GGGTCGCCGGGGGTCAGAGGTCC | 5017 | GGACCTCTGACCCCCGGCGACCC |
| 3755 | AGGGGTCGCCGGGGGTCAGAGGT | 5019 | ACCTCTGACCCCCGGCGACCCCT |
| 3756 | AAGGGGTCGCCGGGGGTCAGAGG | 5020 | CCTCTGACCCCCGGCGACCCCTT |
| 3757 | CAAGGGGTCGCCGGGGGTCAGAG | 5021 | CTCTGACCCCCGGCGACCCCTTG |
| 3758 | GCAAGGGGTCGCCGGGGGTCAGA | 5022 | TCTGACCCCCGGCGACCCCTTGC |
| 3759 | TGCAAGGGGTCGCCGGGGGTCAG | 5023 | CTGACCCCCGGCGACCCCTTGCA |
| 3760 | GTGCAAGGGGTCGCCGGGGGTCA | 5024 | TGACCCCCGGCGACCCCTTGCAC |
| 3761 | AGTGCAAGGGGTCGCCGGGGGTC | 5025 | GACCCCCGGCGACCCCTTGCACT |
| 3762 | GAGTGCAAGGGGTCGCCGGGGGT | 5026 | ACCCCCGGCGACCCCTTGCACTC |
| 3763 | AGAGTGCAAGGGGTCGCCGGGGG | 5027 | CCCCCGGCGACCCCTTGCACTCT |
| 3764 | GAGAGTGCAAGGGGTCGCCGGGG | 5028 | CCCCGGCGACCCCTTGCACTCTC |
| 3765 | GGAGAGTGCAAGGGGTCGCCGGG | 5029 | CCCGGCGACCCCTTGCACTCTCC |
| 3766 | TGGAGAGTGCAAGGGGTCGCCGG | 5030 | CCGGCGACCCCTTGCACTCTCCA |
| 3767 | ATGGAGAGTGCAAGGGGTCGCCG | 5031 | CGGCGACCCCTTGCACTCTCCAT |
| 3768 | CATGGAGAGTGCAAGGGGTCGCC | 5032 | GGCGACCCCTTGCACTCTCCATG |
| 3769 | TCATGGAGAGTGCAAGGGGTCGC | 5033 | GCGACCCCTTGCACTCTCCATGA |
| 3770 | GTCATGGAGAGTGCAAGGGGTCG | 5034 | CGACCCCTTGCACTCTCCATGAC |
| 3771 | TGTCATGGAGAGTGCAAGGGGTC | 5035 | GACCCCTTGCACTCTCCATGACA |
| 3772 | GTGTCATGGAGAGTGCAAGGGGT | 5036 | ACCCCTTGCACTCTCCATGACAC |
| 3773 | AGTGTCATGGAGAGTGCAAGGGG | 5037 | CCCCTTGCACTCTCCATGACACT |
| 3774 | AAGTGTCATGGAGAGTGCAAGGG | 5038 | CCCTTGCACTCTCCATGACACTT |
| 3775 | AAAGTGTCATGGAGAGTGCAAGG | 5039 | CCTTGCACTCTCCATGACACTTT |
| 3776 | GAAAGTGTCATGGAGAGTGCAAG | 5040 | CTTGCACTCTCCATGACACTTTC |
| 3777 | AGAAAGTGTCATGGAGAGTGCAA | 5041 | TTGCACTCTCCATGACACTTTCT |
| 3778 | GAGAAAGTGTCATGGAGAGTGCA | 5042 | TGCACTCTCCATGACACTTTCTC |
| 3779 | AGAGAAAGTGTCATGGAGAGTGC | 5043 | GCACTCTCCATGACACTTTCTCT |
| 3780 | GAGAGAAAGTGTCATGGAGAGTG | 5044 | CACTCTCCATGACACTTTCTCTC |
| 3781 | GGAGAGAAAGTGTCATGGAGAGT | 5045 | ACTCTCCATGACACTTTCTCTCC |
| 3782 | GGGAGAGAAAGTGTCATGGAGAG | 5046 | CTCTCCATGACACTTTCTCTCCC |
| 3783 | TGGGAGAGAAAGTGTCATGGAGA | 5047 | TCTCCATGACACTTTCTCTCCCA |
| 3784 | ATGGGAGAGAAAGTGTCATGGAG | 5048 | CTCCATGACACTTTCTCTCCCAT |
| 3785 | CATGGGAGAGAAAGTGTCATGGA | 5049 | TCCATGACACTTTCTCTCCCATG |
| 3786 | CCATGGGAGAGAAAGTGTCATGG | 5050 | CCATGACACTTTCTCTCCCATGG |
| 3787 | ACCATGGGAGAGAAAGTGTCATG | 5051 | CATGACACTTTCTCTCCCATGGT |
| 3788 | CACCATGGGAGAGAAAGTGTCAT | 5052 | ATGACACTTTCTCTCCCATGGTG |
| 3789 | CCACCATGGGAGAGAAAGTGTCA | 5053 | TGACACTTTCTCTCCCATGGTGG |
| 3790 | GCCACCATGGGAGAGAAAGTGTC | 5054 | GACACTTTCTCTCCCATGGTGGC |
| 3791 | TGCCACCATGGGAGAGAAAGTGT | 5055 | ACACTTTCTCTCCCATGGTGGCA |
| 3792 | CTGCCACCATGGGAGAGAAAGTG | 5056 | CACTTTCTCTCCCATGGTGGCAG |

*At least one nucleoside linkage of the nucleobase sequence is selected from a
phosphorothioate linkage, an alkyl phosphate linkage, a phosphorodithioate linkage,
a phosphotriester linkage, an alkylphosphonate linkage, a 3-methoxypropyl phosphonate
linkage, a methylphosphonate linkage, an aminoalkylphosphotriester linkage, an
alkylene phosphonate linkage, a phosphinate linkage, a phosphoramidate linkage, a
phosphoramidothioate linkage, a thiophosphorodiamidate linkage, a phosphorodiamidate
(e.g., comprising a phosphorodiamidate morpholino (PMO), 3′amino ribose, or 5′ amino
ribose) linkage, an aminoalkylphosphoramidate linkage, a thiophosphoramidate linkage,
a thionoalkylphosphonate linkage, a thionoalkylphosphotriester linkage, a
thiophosphate linkage, a selenophosphate linkage, and a boranophosphate linkage.

TABLE 2B
Example UNC13A Oligonucleotide
Variant Sequences

| SEQ | | SEQ | |
|---|---|---|---|
| ID | AON Sequence* | ID | Target Sequence |
| NO: | (5′ → 3′) | NO: | (5′ → 3′) |
| 5209 | TCTTTCCAGGAAACCCAG | 5222 | TGCCTGGGTTTCCTGGAA |
| | GCA | | AGA |
| 5210 | CTTTCCAGGAAACCCAGG | 5223 | TGCCTGGGTTTCCTGGAA |
| | CA | | AG |
| 5211 | TCTTTCCAGGAAACCCAG | 5224 | GCCTGGGTTTCCTGGAAA |
| | GC | | GA |
| 5212 | TTTCCAGGAAACCCAGGC | 5225 | TGCCTGGGTTTCCTGGA |
| | A | | AA |
| 5213 | TCTTTCCAGGAAACCCAG | 5226 | CCTGGGTTTCCTGGAAA |
| | G | | GA |
| 5214 | TTCCAGGAAACCCAGGCA | 5227 | TGCCTGGGTTTCCTGGAA |
| 5215 | TCTTTCCAGGAAACCCAG | 5228 | CTGGGTTTCCTGGAAAGA |
| 5216 | TCCAGGAAACCCAGGCA | 5229 | TGCCTGGGTTTCCTGGA |
| 5217 | TCTTTCCAGGAAACCCA | 5230 | TGGGTTTCCTGGAAAGA |
| 5218 | CCAGGAAACCCAGGCA | 5231 | TGCCTGGGTTTCCTGG |
| 5219 | TCTTTCCAGGAAACCC | 5232 | GGGTTTCCTGGAAAGA |
| 5220 | CAGGAAACCCAGGCA | 5233 | TGCCTGGGTTTCCTG |
| 5221 | TCTTTCCAGGAAACC | 5234 | GGTTTCCTGGAAAGA |

*At least one nucleoside linkage of the nucleobase sequence is selected from a phosphorothioate linkage, an alkyl phosphate linkage, a phosphorodithioate linkage, a phosphotriester linkage, an alkylphosphonate linkage, a 3-methoxypropyl phosphonate linkage, a methylphosphonate linkage, an aminoalkylphosphotriester linkage, an alkylene phosphonate linkage, a phosphinate linkage, a phosphoramidate linkage, a phosphoramidothioate linkage, a thiophosphorodiamidate linkage, a phosphorodiamidate (e.g., comprising a phosphorodiamidate morpholino (PMO), 3′ amino ribose, or 5′ amino ribose) linkage, an aminoalkylphosphoramidate linkage, a thiophosphoramidate linkage, a thionoalkylphosphonate linkage, a thionoalkylphosphotriester linkage, a thiophosphate linkage, a selenophosphate linkage, and a boranophosphate linkage.

[0219] In various embodiments, each of the nucleosides of antisense oligonucleotides shown in Table 2B are modified nucleosides with 2′-O-(2-methoxyethyl) (2′MOE) sugar moieties, and each “C” is replaced with a 5-methylcytosine (5-MeC). Additionally, each of the internucleoside linkages between the nucleosides are phosphorothioate internucleoside linkages.

Antisense Oligonucleotides with One or More Locked Nucleic Acids (LNAs)

[0220] In various embodiments, antisense oligonucleotides disclosed herein (e.g., UNC13A parent oligonucleotides and/or UNC13A oligonucleotide variants) comprise one or more locked nucleic acids (LNAs). In particular embodiments, an antisense oligonucleotide includes one LNA. In particular embodiments, an antisense oligonucleotide includes two LNAs. In particular embodiments, an antisense oligonucleotide includes three LNAs. Generally, a LNA refers to nucleic acid monomers having a bridge (e.g., methylene, ethylene, aminooxy, or oxyimino bridge) connecting two carbon atoms between the 4′ and 2′ position of the nucleoside sugar unit, thereby forming a bicyclic sugar.

[0221] In some embodiments, an antisense oligonucleotide disclosed herein includes, if counting from 5′ to 3′, a LNA at a 4^{th} position of the antisense oligonucleotide. In some embodiments, an antisense oligonucleotide disclosed herein includes, if counting from 5′ to 3′, a LNA at a 7^{th} position of the antisense oligonucleotide. In some embodiments, an antisense oligonucleotide disclosed herein includes, if counting from 5′ to 3′, a LNA at a 9^{th} position of the antisense oligonucleotide. In some embodiments, an antisense oligonucleotide disclosed herein includes, if counting from 5′ to 3′, a LNA at a 12^{th} position of the antisense oligonucleotide. In some embodiments, an antisense oligonucleotide disclosed herein includes, if counting from 5′ to 3′, a LNA at a 15^{th} position of the antisense oligonucleotide. In some embodiments, an antisense oligonucleotide disclosed herein includes, if counting from 5′ to 3′, a LNA at a 17^{th} position of the antisense oligonucleotide. In some embodiments, an antisense oligonucleotide disclosed herein includes, if counting from 5′ to 3′, a LNA at a 20^{th} position of the antisense oligonucleotide.

[0222] In various embodiments, antisense oligonucleotides disclosed herein (e.g., UNC13A parent oligonucleotides and/or UNC13A oligonucleotide variants) comprise two LNAs located at two different positions of the antisense oligonucleotide. In some embodiments, an antisense oligonucleotide disclosed herein includes, if counting from 5′ to 3′, a first LNA at a fourth position of the antisense oligonucleotide and a second LNA at a 20^{th} position of the antisense oligonucleotide. In some embodiments, an antisense oligonucleotide disclosed herein includes, if counting from 5′ to 3′, a first LNA at a 7^{th} position of the antisense oligonucleotide and a second LNA at a 15^{th} position of the antisense oligonucleotide. In some embodiments, an antisense oligonucleotide disclosed herein includes, if counting from 5′ to 3′, a first LNA at a 7^{th} position of the antisense oligonucleotide and a second LNA at a 17^{th} position of the antisense oligonucleotide. In some embodiments, an antisense oligonucleotide disclosed herein includes, if counting from 5′ to 3′, a first LNA at a 9^{th} position of the antisense oligonucleotide and a second LNA at a 17^{th} position of the antisense oligonucleotide.

[0223] In various embodiments, antisense oligonucleotides disclosed herein (e.g., UNC13A parent oligonucleotides and/or UNC13A oligonucleotide variants) comprise three LNAs located at three different positions of the antisense oligonucleotide. In some embodiments, an antisense oligonucleotide disclosed herein includes, if counting from 5′ to 3′, a first LNA at a 4^{th} position of the antisense oligonucleotide, a second LNA at a 12^{th} position of the antisense oligonucleotide, and a third LNA at a 20^{th} position of the antisense oligonucleotide.

Antisense Oligonucleotides with One or More Spacers

[0224] In various embodiments, antisense oligonucleotides comprise one or more spacers. In particular embodiments, an antisense oligonucleotide includes one spacer. In particular embodiments, an antisense oligonucleotide includes two spacers. In particular embodiments, an antisense oligonucleotide includes three spacers. Generally, a spacer refers to a nucleoside-replacement group lacking a nucleotide base and wherein the nucleoside sugar moiety is replaced by a non-sugar substitute group. The non-sugar substitute group is not capable of linking to a nucleobase, but is capable of linking with the 3′ and 5′ positions of nucleosides adjacent to the spacer through an internucleoside linking group.

[0225] In certain embodiments, an oligonucleotide with one or more spacers, such as disclosed herein, may be an oligonucleotide with 5 to 100 oligonucleotide units in length, for example, 10 to 60 oligonucleotide units in length, for example, 12 to 50 oligonucleotide units in length, 14 to 40 oligonucleotide units in length, 10 to 30 oligonucleotide units in length, for example, 14 to 30 oligonucleotide units in length, for example, 14 to 25 or 15 to 22 oligonucleotide units in length, or 18, 19, 20, 21, 22, 23, 24, or 25 oligonucleotide units in length. As used herein, an “oligonucleotide unit” refers to either a nucleoside (e.g., a nucleoside which includes a sugar and/or a nucleobase) or a nucleoside-replacement group (e.g., a spacer) of the oligonucleotide.

[0226] In particular embodiments, oligonucleotides with one or more spacers are 25 oligonucleotide units in length. In particular embodiments, the oligonucleotides with one or more spacers are 23 oligonucleotide units in length. In particular embodiments, the oligonucleotides with one or more spacers are 21 oligonucleotide units in length. In particular embodiments, the oligonucleotides with one or more spacers are 19 oligonucleotide units in length. In various embodiments, the oligonucleotides with one or more spacers are at least 18, at least 19, at least 20, at least 21, at least 22, at least 23, at least 24, or at least 25 oligonucleotide units in length. In various embodiments, the oligonucleotides with one or more spacers are at least 18 oligonucleotide units in length. In various embodiments, the oligonucleotides with one or more spacers are at least 19 oligonucleotide units in length. In various embodiments, the oligonucleotides with one or more spacers are at least 20 oligonucleotide units in length. In various embodiments, the oligonucleotides with one or more spacers are at least 21 oligonucleotide units in length. In various embodiments, the oligonucleotides with one or more spacers are at least 22 oligonucleotide units in length. In various embodiments, the oligonucleotides with one or more spacers are at least 23 oligonucleotide units in length. In various embodiments, the oligonucleotides with one or more spacers are at least 24 oligonucleotide units in length. In various embodiments, the oligonucleotides with one or more spacers are at least 25 oligonucleotide units in length.

[0227] In various embodiments, a UNC13A AON comprises a sequence that shares at least 80% identity with an equal length portion of any one of SEQ ID NOs: 5066-5166, SEQ ID NOs: 5168-5202, SEQ ID NOs: 5209-5221, or SEQ ID NOs: 5235-5292. In various embodiments, a UNC13A AON comprises a sequence that shares at least 85% identity with an equal length portion of any one of SEQ ID NOs: 5066-5166, SEQ ID NOs: 5168-5202, SEQ ID NOs: 5209-5221, or SEQ ID NOs: 5235-5292. In various embodiments, a UNC13A AON comprises a sequence that shares at least 90% identity with an equal length portion of any one of SEQ ID NOs: 5066-5166, SEQ ID NOs: 5168-5202, SEQ ID NOs: 5209-5221, or SEQ ID NOs: 5235-5292. In various embodiments, a UNC13A AON comprises a sequence that shares at least 95% identity with an equal length portion of any one of SEQ ID NOs: 5066-5166, SEQ ID NOs: 5168-5202, SEQ ID NOs: 5209-5221, or SEQ ID NOs: 5235-5292. In various embodiments, a UNC13A AON comprises a sequence that shares 100% identity with an equal length portion of any one of SEQ ID NOs: 5066-5166, SEQ ID NOs: 5168-5202, SEQ ID NOs: 5209-5221, or SEQ ID NOs: 5235-5292.

[0228] In some embodiments, the spacer is of Formula (X):

[chemical structure]

wherein ring A is as defined herein.

[0229] In some embodiments, the spacer is of Formula (Xa):

[chemical structure]

wherein ring A is as defined herein and the —CH₂—O— group is on a ring A atom adjacent to the —O— group.

[0230] As generally defined herein, ring A of formulae (X) and (Xa), is an optionally substituted 4-8 member monocyclic cycloalkyl group (e.g. ring A is cyclobutyl, cyclopentyl, cyclohexyl, cycloheptyl, cyclooctyl) or a 4-8 member monocyclic heterocyclyl group, wherein the heterocyclyl group contains 1 or 2 heteroatoms selected from O, S and N (e.g. ring A is oxetanyl, tetrahydrofuranyl, tetrahydropyranyl, 1,4-dioxanyl, pyrrolidinyl, piperidinyl, piperazinyl, morpholinyl, azepanyl). In some embodiments, ring A is tetrahydrofuranyl. In some embodiments, ring A is tetrahydropyranyl. In some embodiments, ring A is pyrrolidinyl. In some embodiments, ring A is cyclopentyl. In some embodiments, the monocyclic cycloalkyl or monocyclic heterocyclyl is not further substituted. In some embodiments, the cycloalkyl or heterocyclyl is further substituted with 0, 1, 2 or 3 substituents selected from halo (e.g., —F, —Cl), —OMe, —OEt —O(CH₂)OMe, —O(CH₂)₂OMe and CN.

[0231] In some embodiments, tetrahydrofuranyl is substituted with 1 or 2 substituents selected from halo (e.g., —F, —Cl), —OMe, -OEt —O(CH₂)OMe, —O(CH₂)₂OMe and CN. In some embodiments, tetrahydrofuranyl is substituted with 2 substituents selected from halo (e.g., —F, —Cl), —OMe, -OEt —O(CH₂)OMe, —O(CH₂)₂OMe and CN. In some embodiments, tetrahydrofuranyl is substituted with 1 substituent selected from halo (e.g., —F, —Cl), —OMe, -OEt —O(CH₂)OMe, —O(CH₂)₂OMe and CN. In some embodiments, tetrahydrofuranyl is substituted with —O(CH₂)₂OMe.

[0232] In some embodiments, the spacer is represented by Formula (I), wherein:

[chemical structure]

[0233] X is selected from —CH₂— and —O—; and
[0234] n is 0, 1, 2 or 3.

[0235] In some embodiments, the spacer is represented by Formula (I′), wherein:

[chemical structure]

[0236] X is selected from —CH₂— and —O—; and
[0237] n is 0, 1, 2 or 3.

[0238] In some embodiments, the spacer is represented by Formula (Ia), wherein:

[chemical structure]

[0239] and n is 0, 1, 2 or 3.

[0240] In some embodiments, the spacer is represented by Formula (Ia′), wherein:

[chemical structure]

[0241] and n is 0, 1, 2 or 3.

[0242] As generally defined herein, X is selected from —CH₂— and —O—. In some embodiments, X is —CH₂—. In other embodiments, X is —O—.

[0243] As generally defined herein, n is 0, 1, 2 or 3. In some embodiments, n is 0. In some embodiments, n is 1 or 2. In some embodiments, n is 1. In other embodiments, n is 2. In certain embodiments, n is 3.

[0244] In some embodiments, the spacer is represented by Formula (II), wherein:

[chemical structure]

[0245] X is selected from —CH₂— and —O—.

[0246] In some embodiments, the spacer is represented by Formula (II′), wherein:

[chemical structure]

[0247] X is selected from —CH₂— and —O.

[0248] In some embodiments, the spacer is represented by Formula (Iia), wherein:

[chemical structure]

[0249] In some embodiments, the spacer is represented by Formula (Iia′), wherein:

[chemical structure]

[0250] In some embodiments, the spacer is represented by Formula (IIi), wherein:

[chemical structure]

[0251] X is selected from —CH₂— and —O—.

[0252] In some embodiments, the spacer is represented by Formula (IIi′), wherein:

[chemical structure]

### Formula (IIi′)

[0253] X is selected from —CH₂— and —O.

[0254] In some embodiments, the spacer is represented by Formula (IIib), wherein:

[chemical structure]

[0255] In some embodiments, the spacer is represented by Formula (IIib′), wherein:

[chemical structure]

[0256] In some embodiments, the spacer is represented by Formula (III), wherein:

[chemical structure]

[0257] X is selected from —CH₂— and —O—.

[0258] In some embodiments, the spacer is represented by Formula (III′), wherein:

[chemical structure]

[0259] X is selected from —CH₂— and —O.

[0260] In some embodiments, the spacer is represented by Formula (IIIa), wherein:

[chemical structure]

[0261] In some embodiments, the spacer is represented by Formula (IIIa′), wherein:

[chemical structure]

[0262] In some embodiments, the open positions of Formulae (I), (I′), (Ia), (Ia′), (II), (II′), (Iia), (Iia′), (III), (III′), (IIIa) and (IIIa′) (i.e., the positions not specifically depicted as bearing exclusively hydrogen atoms, including the —CH₂— group of X) are further substituted with 0-3 substituents independently selected from halo (e.g., —F, —Cl), -OMe, -OEt —O(CH₂)OMe, —O(CH₂)₂OMe and CN. In some embodiments, Formulae (I), (I′), (Ia), (Ia′), (II), (II′), (Iia), (Iia′), (III), (III′), (IIIa) and (IIIa′) are not further substituted.

[0263] As described further below, a UNC13A oligonucleotide with one or more spacers is described in reference to a corresponding UNC13A parent oligonucleotide or a corresponding UNC13A variant oligonucleotide. In various embodiments, a UNC13A oligonucleotide with a spacer differs from a UNC13A parent oligonucleotide or an UNC13A variant oligonucleotide in that the spacer replaces a nucleoside in the UNC13A parent oligonucleotide or an UNC13A variant oligonucleotide. As used hereafter, the “position” of the UNC13A oligonucleotide refers to a particular location as counted from the 5′ end of the UNC13A oligonucleotide. In various embodiments, the spacer replaces a nucleoside at any one of positions 1, 2, 3, 4, 5, 6, 7, 8, 9, 10, 11, 12, 13, 14, 15, 16, 17, 18, 19, 20, 21, 22, 23, 24, or 25 of the UNC13A parent oligonucleotide or an UNC13A variant oligonucleotide. In particular embodiments, a spacer replaces a nucleoside at one of positions 7, 8, 11, 14, 16, 19, or 22 of the UNC13A parent oligonucleotide or an UNC13A variant oligonucleotide.

[0264] In various embodiments, a UNC13A oligonucleotide includes one spacer that replaces a nucleoside in the UNC13A oligonucleotide (e.g., one spacer replaces one nucleoside of the UNC13A oligonucleotide). In particular embodiments, the spacer replaces a nucleoside between positions 9 and 15 of the UNC13A oligonucleotide. In particular embodiments, the spacer replaces a nucleoside between positions 9 and 12 of the UNC13A oligonucleotide. In particular embodiments, the spacer replaces a nucleoside at position 10 of the UNC13A oligonucleotide. In particular embodiments, the spacer replaces a nucleoside at position 11 of the UNC13A oligonucleotide. In particular embodiments, the spacer replaces a nucleoside at position 12 of the UNC13A oligonucleotide. In particular embodiments, the spacer replaces a nucleoside between positions 12 and 16 of the UNC13A oligonucleotide. In particular embodiments, the spacer replaces a nucleoside at position 15 of the UNC13A oligonucleotide.

[0265] In various embodiments, a UNC13A oligonucleotide including one spacer has 2 segments, where at least one of the 2 segments has at most 11 linked nucleosides. For example, the UNC13A oligonucleotide may be 23 oligonucleotide units in length, and the spacer can be located at position 12. Therefore, the UNC13A oligonucleotide has 2 segments divided by the spacer, where both of the 2 segments are 11 nucleobases in length. In various embodiments, a UNC13A oligonucleotide including one spacer has 2 segments, where at least one of the 2 segments has at most 10 linked nucleosides. For example, the UNC13A oligonucleotide may be 21 oligonucleotide units in length, and the spacer can be located at position 11. Therefore, the UNC13A oligonucleotide has 2 segments divided by the spacer, where both of the 2 segments are 10 nucleobases in length. As another example, the UNC13A oligonucleotide may be 25 oligonucleotide units in length, and the spacer can be located at position 15. Therefore, the UNC13A oligonucleotide has 2 segments divided by the spacer, where one of the 2 segments is 14 nucleobases in length and the second of the 2 segments is 10 nucleobases in length.

[0266] In various embodiments, a UNC13A oligonucleotide includes two spacers that each replace a nucleoside in the UNC13A oligonucleotide (e.g., two spacers replace two separate nucleosides of the UNC13A oligonucleotide). In various embodiments, a first spacer and a second spacer are separated by at least 5 nucleobases, at least 6 nucleobases, at least 7 nucleobases, at least 8 nucleobases, at least 9 nucleobases, or at least 10 nucleobases in the oligonucleotide. In particular embodiments, a first spacer and a second spacer are separated by at least 5 nucleobases, at least 6 nucleobases, or at least 7 nucleobases. In particular embodiments, the first spacer and the second spacer are not adjacent to one another in the oligonucleotide.

[0267] In particular embodiments, the first spacer replaces a nucleoside between positions 7 and 11 of the UNC13A oligonucleotide. In various embodiments, the first spacer replaces a nucleoside between positions 8 and 11, positions 9 and 11, positions 10 and 11, positions 7 and 10, positions 7 and 9, positions 7 and 8, positions 8 and 10, positions 8 and 9, or positions 9 and 10 of the UNC13A oligonucleotide. In particular embodiments, the second spacer replaces a nucleoside between positions 14 and 22 of the UNC13A oligonucleotide. In various embodiments, the second spacer replaces a nucleoside between positions 15 and 22, positions 16 and 22, positions 17 and 22, position 18 and 22, position 19 and 22, positions 20 and 22, positions 21 and 22, positions 15 and 21, position 16 and 21, positions 17 and 21, positions 18 and 21, positions 19 and 21, positions 20 and 21, positions 15 and 20, positions 16 and 20, positions 17 and 20, positions 18 and 20, positions 19 and 20, positions 15 and 19, positions 16 and 19, positions 17 and 19, positions 18 and 19, positions 15 and 18, position 16 and 18, position 17 and 18, positions 15 and 17, positions 16 and 17, or positions 15 and 16 of the UNC13A oligonucleotide.

[0268] In preferred embodiments, the first spacer replaces a nucleoside at position 7 of the UNC13A oligonucleotide and the second spacer replaces a nucleoside at position 14 of the UNC13A oligonucleotide. In preferred embodiments, the first spacer replaces a nucleoside at position 7 of the UNC13A oligonucleotide and the second spacer replaces a nucleoside at position 19 of the UNC13A oligonucleotide. In preferred embodiments, the first spacer replaces a nucleoside at position 8 of the UNC13A parent oligonucleotide and the second spacer replaces a nucleoside at position 16 of the UNC13A parent oligonucleotide. In preferred embodiments, the first spacer replaces a nucleoside at position 8 of the UNC13A oligonucleotide and the second spacer replaces a nucleoside at position 15 of the UNC13A oligonucleotide. In preferred embodiments, the first spacer replaces a nucleoside at position 11 of the UNC13A oligonucleotide and the second spacer replaces a nucleoside at position 22 of the UNC13A oligonucleotide. In preferred embodiments, the first spacer replaces a nucleoside at position 9 of the UNC13A oligonucleotide and the second spacer replaces a nucleoside at position 19 of the UNC13A oligonucleotide.

[0269] In various embodiments, a UNC13A oligonucleotide includes three spacers that each replace a nucleoside in the UNC13A oligonucleotide (e.g., three spacers replace three separate nucleosides of the UNC13A oligonucleotide). In particular embodiments, the first spacer replaces a nucleoside between positions 7 and 11 of the UNC13A oligonucleotide. In particular embodiments, the second spacer replaces a nucleoside between positions 14 and 22 of the UNC13A oligonucleotide. In particular embodiments, the third spacer replaces a nucleoside between positions 21 and 24 of the UNC13A oligonucleotide. In some embodiments, the first spacer replaces a nucleoside between positions 2 and 5 of the UNC13A oligonucleotide. In particular embodiments, the second spacer replaces a nucleoside between positions 8 and 12 of the UNC13A oligonucleotide. In particular embodiments, the third spacer replaces a nucleoside between positions 18 and 22 of the UNC13A oligonucleotide.

[0270] In various embodiments, the three spacers in a UNC13A oligonucleotide are positioned such that each of the four segments of the UNC13A oligonucleotide are at most 7 linked nucleosides in length. For example, a UNC13A oligonucleotide may have a first segment with 7 linked nucleosides connected to a first spacer, then a second segment with 7 linked nucleosides connected on one end to the first spacer and connected on another end to a second spacer, then a third segment with 6 linked nucleosides connected on one end to the second spacer and connected on another end to a third spacer, then a fourth segment with 6 linked nucleosides connected to the third spacer.

[0271] In various embodiments, the one or more spacers are positioned in the oligonucleotide to replace one or more adenosine or thymine nucleosides (as opposed to guanine or cytosine nucleosides). For example, the one or more spacers can replace one, two, three, four, five, six, seven, eight, or nine adenosine or thymine nucleosides in the oligonucleotide. In various embodiments, the one or more spacers are positioned in the oligonucleotide to replace one or more guanine or cytosine nucleosides (as opposed to adenosine or thymine nucleosides). For example, the one or more spacers can replace one, two, three, four, five, six, seven, eight, or nine guanine or cytosine nucleosides in the oligonucleotide. In various embodiments, the spacers are positioned in the oligonucleotide to replace an equal number of adenosine/thymine nucleosides and guanine/cytosine nucleosides. For example, a first spacer in the oligonucleotide may replace an adenosine/thymine nucleoside and a second spacer in the oligonucleotide may replace a guanine/cytosine nucleoside.

[0272] In various embodiments, the one or more spacers are positioned in the oligonucleotide to control the sequence content in the oligonucleotide. For example, the one or more spacers are positioned such that at least one of the spacers is located adjacent to a guanine group. In various embodiments, an oligonucleotide with spacers can include one spacer adjacent to a guanine group, two spacers adjacent to guanine groups, three spacers adjacent to guanine groups, four spacers adjacent to guanine groups, or five spacers adjacent to guanine groups. In one embodiment, if counting from the 5′ end of the oligonucleotide, a spacer immediately precedes a guanine group in the sequence. Thus, in various embodiments, an oligonucleotide with spacers can include one spacer that immediately precedes a guanine group, two spacers that each immediately precede a guanine group, three spacers that each immediately precede a guanine group, four spacers that each immediately precede a guanine group, or five spacers that each immediately precede a guanine group. In one embodiment, if counting from the 5′ end of the oligonucleotide, a guanine group is immediately succeeded by a spacer. Thus, in various embodiments, an oligonucleotide with spacers can include one spacer that immediately succeeds a guanine group, two spacers that each immediately succeed a guanine group, three spacers that each immediately succeed a guanine group, four spacers that each immediately succeed a guanine group, or five spacers that each immediately succeed a guanine group. In various embodiments, the spacers in the oligonucleotide can be positioned to maximize the number of spacers adjacent to guanine groups.

[0273] In various embodiments, the one or more spacers are positioned in the oligonucleotide to replace one or more adenosine or thymine nucleosides such that the one or more spacers are located adjacent guanine groups. For example, two spacers can replace adenosine or thymine nucleosides in the oligonucleotide, each of the two spacers being located adjacent to a guanine group.

[0274] In various embodiments, the UNC13A oligonucleotide with one or more spacers has a particular GC content. As used herein, GC content (or guanine-cytosine content) is the percentage of nitrogenous bases in the oligonucleotide that are either guanine (G) or cytosine (C). In various embodiments, the UNC13A oligonucleotide with one or more spacers has at least 10% GC content, at least 20% GC content, at least 25% GC content, at least 30% GC content, at least 35% GC content, at least 40% GC content, at least 45% GC content, at least 50% GC content, at least 55% GC content, at least 60% GC content, at least 65% GC content, at least 75% GC content, at least 80% GC content, at least 85% GC content, at least 90% GC content, or at least 95% GC content. In particular embodiments, the UNC13A oligonucleotide with one or more spacers has at least 30% GC content. In particular embodiments, the UNC13A oligonucleotide with one or more spacers has at least 40% GC content. In various embodiments, the one or more spacers are positioned in the UNC13A oligonucleotide to maximize GC content. For example, instead of selecting a guanine or cytosine for replacement by a spacer in the UNC13A oligonucleotide, a thymine or adenine can be selected for replacement by a spacer.

[0275] In various embodiments, a UNC13A oligonucleotide with spacers is designed such that 1) each segment of the UNC13A oligonucleotide has at most 7 linked nucleosides and 2) at least two, three, or four spacers are positioned adjacent to a guanine group. In some embodiments, a UNC13A oligonucleotide with spacers is designed such that 1) each segment of the UNC13A oligonucleotide has at most 7 linked nucleosides and 2) each of two spacers precede a guanine group.

[0276] In various embodiments, the inclusion of one or more spacers in the UNC13A oligonucleotide does not decrease the effectiveness of the UNC13A oligonucleotide with the spacers in restoring full length UNC13A protein or full length UNC13A mRNA in comparison to the effect of a corresponding UNC13A parent oligonucleotide. In various embodiments, the inclusion of one or more spacers in the UNC13A oligonucleotide increases the effectiveness of the UNC13A oligonucleotide with the spacers in restoring full length UNC13A protein or full length UNC13A mRNA in comparison to the effect of a corresponding UNC13A parent oligonucleotide. In various embodiments, the inclusion of one or more spacers in the UNC13A oligonucleotide does not decrease the effectiveness of the UNC13A oligonucleotide with the spacers in reducing quantity of UNC13A transcripts in comparison to the effect of a corresponding UNC13A parent oligonucleotide. In various embodiments, the inclusion of one or more spacers in the UNC13A oligonucleotide increases the effectiveness of the UNC13A oligonucleotide with the spacers in reducing quantity of UNC13A transcripts in comparison to the effect of a corresponding UNC13A parent oligonucleotide.

[0277] Tables 3A, 3B, 4, and 5 document example UNC13A oligonucleotides with one or more spacers and their relation to corresponding UNC13A parent oligonucleotides. Each UNC13A oligonucleotide is assigned a sequence name. As used hereafter, the nomenclature of the sequence name is expressed as “X_spA” (for a UNC13A AON with one spacer), “X_spA_spB” (for a UNC13A AON with two spacers), or “X_spA_spB_spC” (for a UNC13A AON with three spacers). Here, “X” refers to the length of the UNC13A AON, “A” refers to the position in the UNC13A AON where the first spacer is located, “B” refers to the position in the UNC13A AON where the second spacer is located, and if present, “C” refers to the position in the UNC13A AON where the third spacer is located.

[0278] In various embodiments, UNC13A oligonucleotides include one spacer. In various embodiments, the UNC13A oligonucleotides are oligonucleotide variants, such as any one of a 23mer, 21mer, or 19mer. In various embodiments, the inclusion of a spacer divides up the UNC13A oligonucleotide into two separate segments, where at least one of the segments is at most 11 linked nucleosides in length. In various embodiments, the inclusion of a spacer divides up the UNC13A oligonucleotide into two separate segments, where at least one of the segments is at most 10 linked nucleosides in length.

[0279] In various embodiments, the spacer is located between positions 10 and 15 of the oligonucleotide. In various embodiments, the spacer is located between positions 10 and 12 of the oligonucleotide. In particular embodiments, the spacer is located at position 10 of the oligonucleotide. In particular embodiments, the spacer is located at position 11 of the oligonucleotide. In particular embodiments, the spacer is located at position 12 of the oligonucleotide. In particular embodiments, the spacer is located at position 15 of the oligonucleotide. Example UNC13A AONs with one spacer are documented below in Table 3A.

TABLE 3A
Identification of UNC13A AONs with one spacer. Here, each UNC13A AON has 2
segments, where at least one of the segments has at most 11 linked nucleosides.

| | | | Sequence* (where X |
|---|---|---|---|
| | | Se- | indicates a nucleoside |
| | | quence | of the UNC13A parent |
| | | ID | oligonucleotide and S_{y} |
| | Relation to | Number | indicates presence of a |
| | UNC13A | (SEQ | Spacer where y |
| | oligonucleotide | ID | denotes the position) |
| Sequence name | variant | NO) | (5′ → 3′) |
| UNC13A parent | N/A | 5066 | XXXXXXXXXXXXXXXXXXXXXXXXX |
| oligonucleotide | | | (25 mer) |
| UNC13A | Nucleoside at | 5067 | XXXXXXXXXXXXXXXXXXXXXXXX |
| Oligonucleotide (25 mer) | position 15 of | | |
| with Spacer at position | 25 mer is | | |
| 15 | substituted with | | |
| (UNC13A AON | a spacer | | |
| 25_sp15) | | | |
| UNC13A | N/A | 5068 | XXXXXXXXXXXXXXXXXXXXXXX |
| oligonucleotide variant | | | (23 mer) |
| (23_mer) | | | |
| UNC13A | Nucleoside at | 5069 | XXXXXXXXXXXS₁₅XXXXXXXXXXX |
| Oligonucleotide (23 mer) | position 12 of | | |
| with Spacer at position | 23 mer is | | |
| 12 | substituted with | | |
| (UNC13A AON | a spacer | | |
| 23_sp12) | | | |
| UNC13A | N/A | 5070 | XXXXXXXXXXXXXXXXXXXXX |
| oligonucleotide variant | | | (21 mer) |
| (21_mer) | | | |
| UNC13A | Nucleoside at | 5071 | XXXXXXXXXXS₁₁XXXXXXXXXX |
| Oligonucleotide (21 mer) | position 11 of | | |
| with Spacer at position | 21 mer is | | |
| 11 | substituted with | | |
| (UNC13A AON | a spacer | | |
| 21_sp11) | | | |
| UNC13A oligonucleotide | N/A | 5072 | XXXXXXXXXXXXXXXXXXX |
| variant (19 mer) | | | (19 mer) |
| UNC13A | Nucleoside at | 5073 | XXXXXXXXXS₁₀XXXXXXXXX |
| Oligonucleotide (19 mer) | position 10 of | | |
| with Spacer at position | 19 mer is | | |
| 10 | substituted with | | |
| (UNC13A AON | a spacer | | |
| 19_sp10) | | | |

*At least one nucleoside linkage of the nucleobase sequence is selected from a phosphorothioate linkage, an alkyl phosphate linkage, a phosphorodithioate linkage, a phosphotriester linkage, an alkylphosphonate linkage, a 3-methoxypropyl phosphonate linkage, a methylphosphonate linkage, an aminoalkylphosphotriester linkage, an alkylene phosphonate linkage, a phosphinate linkage, a phosphoramidate linkage, a phosphoramidothioate linkage, a phosphorodiamidate (e.g., comprising a phosphorodiamidate morpholino (PMO), 3′ amino ribose, or 5′ amino ribose) linkage, an aminoalkylphosphoramidate linkage, a thiophosphoramidate linkage, a thionoalkylphosphonate linkage, a thionoalkylphosphotriester linkage, a thiophosphate linkage, a selenophosphate linkage, and a boranophosphate linkage.

[0280] In various embodiments, UNC13A oligonucleotides include two spacers. In various embodiments, the inclusion of a spacer divides up the INC13A oligonucleotide into three separate segments, where at least one of the segments is at most 7 linked nucleosides in length. Example UNC13A AONs with two spacers are documented below in Table 3B.

TABLE 3B
Identification of UNC13A AONs with two spacers. Here, each UNC13A AON has 3
segments, where at least one of the segments has at most 7 linked nucleosides.

| | | | Sequence* (where X indicates a |
|---|---|---|---|
| | | | nucleoside of the UNC13A parent |
| | Relation to | Sequence ID | oligonucleotide and Sy indicates |
| | UNC13A parent | Number | presence of a Spacer where y denotes |
| Sequence name | oligonucleotide | (SEQ ID NO) | the position) (5′ → 3′) |
| UNC13A parent | N/A | 5074 | XXXXXXXXXXXXXXXXXXXXXXXXX |
| oligonucleotide | | | |
| UNC13A | Nucleosides at | 5075 | XXXXXXXXXXS11XXXXXXXXXXS22XXX |
| Oligonucleotide | positions 11 and | | |
| with Spacers at | 22 are each | | |
| positions 11 and 22 | substituted with | | |
| (UNC13A AON | a spacer | | |
| 25_sp11sp22) | | | |
| UNC13A | Nucleosides at | 5076 | XXXXXXS7XXXXXXS14XXXXXXXXXXX |
| Oligonucleotide | positions 7 and | | |
| with Spacers at | 14 are each | | |
| positions 7 and 14 | substituted with | | |
| (UNC13A AON | a spacer | | |
| 25_sp7sp14) | | | |
| UNC13A | Nucleosides at | 5077 | XXXXXXXS8XXXXXXXXXXS19XXXXXX |
| Oligonucleotide | positions 8 and | | |
| with Spacers at | 19 are | | |
| positions 8 and 19 | substituted with | | |
| (UNC13A AON | spacers | | |
| 25_sp8sp19) | | | |
| UNC13A | Nucleosides at | 5078 | XXXXXXXS9XXXXXS14XXXXXXXXXXX |
| Oligonucleotide | positions 8 and | | |
| with Spacers at | 14 are | | |
| positions 8 and 14 | substituted with | | |
| (UNC13A AON | spacers | | |
| 25_sp8sp14) | | | |
| UNC13A | Nucleosides at | 5079 | XXXXXXXXS9XXXXS14XXXXXXXXXXX |
| Oligonucleotide | positions 9 and | | |
| with Spacers at | 14 are | | |
| positions 9 and 14 | substituted with | | |
| (UNC13A AON | spacers | | |
| 25_sp9sp14) | | | |
| UNC13A | Nucleosides at | 5080 | XXXXXXXXXS10XXXS14XXXXXXXXXXX |
| Oligonucleotide | positions 10 and | | |
| with Spacers at | 14 are | | |
| positions 10 and 14 | substituted with | | |
| (UNC13A AON | spacers | | |
| 25_sp10sp14) | | | |
| UNC13A | Nucleosides at | 5081 | XXXXXXXXXXS11XXS14XXXXXXXXXXX |
| Oligonucleotide | positions 11 and | | |
| with Spacers at | 14 are | | |
| positions 11 and 14 | substituted with | | |
| (UNC13A AON | spacers | | |
| 25_sp11sp14) | | | |
| UNC13A | Nucleosides at | 5082 | XXXXXXXS8XXXXXXS15XXXXXXXXXX |
| Oligonucleotide | positions 8 and | | |
| with Spacers at | 15 are | | |
| positions 8 and 15 | substituted with | | |
| (UNC13A AON | spacers | | |
| 25_sp8sp15) | | | |
| UNC13A | Nucleosides at | 5083 | XXXXXXXXS9XXXXXS15XXXXXXXXXX |
| Oligonucleotide | positions 9 and | | |
| with Spacers at | 15 are | | |
| positions 9 and 15 | substituted with | | |
| (UNC13A AON | spacers | | |
| 25_sp9sp15) | | | |
| UNC13A | Nucleosides at | 5084 | XXXXXXXXXS10XXXXS15XXXXXXXXXX |
| Oligonucleotide | positions 10 and | | |
| with Spacers at | 15 are | | |
| positions 10 and 15 | substituted with | | |
| (UNC13A AON | spacers | | |
| 25_sp10sp15) | | | |
| UNC13A | Nucleosides at | 5085 | XXXXXXXXXXS11XXXS15XXXXXXXXXX |
| Oligonucleotide | positions 11 and | | |
| with Spacers at | 15 are | | |
| positions 11 and 15 | substituted with | | |
| (UNC13A AON | spacers | | |
| 25_sp11sp15) | | | |
| UNC13A | Nucleosides at | 5086 | XXXXXXXS8XXXXXXXS16XXXXXXXXX |
| Oligonucleotide | positions 8 and | | |
| with Spacers at | 16 are | | |
| positions 8 and 16 | substituted with | | |
| (UNC13A AON | spacers | | |
| 25_sp8sp16) | | | |
| UNC13A | Nucleosides at | 5087 | XXXXXXXXS9XXXXXXS16XXXXXXXXX |
| Oligonucleotide | positions 9 and | | |
| with Spacers at | 16 are | | |
| positions 9 and 16 | substituted with | | |
| (UNC13A AON | spacers | | |
| 25_sp9sp16) | | | |
| UNC13A | Nucleosides at | 5088 | XXXXXXXXXS10XXXXXS16XXXXXXXXX |
| Oligonucleotide | positions 10 and | | |
| with Spacers at | 16 are | | |
| positions 10 and 16 | | | |
| (UNC13A AON | substituted with | | |
| 25_sp10sp16) | spacers | | |
| UNC13A | Nucleosides at | 5089 | XXXXXXXXXXS11XXXXS16XXXXXXXXX |
| Oligonucleotide | positions 11 and | | |
| with Spacers at | 16 are | | |
| positions 11 and 16 | substituted with | | |
| (UNC13A AON | spacers | | |
| 25_spl1sp16) | | | |
| UNC13A | Nucleosides at | 5090 | XXXXXXXS8XXXXXXXXS17XXXXXXXX |
| Oligonucleotide | positions 8 and | | |
| with Spacers at | 17 are | | |
| positions 8 and 17 | substituted with | | |
| (UNC13A AON | spacers | | |
| 25_sp8sp17) | | | |
| UNC13A | Nucleosides at | 5091 | XXXXXXXXS9XXXXXXXS17XXXXXXXX |
| Oligonucleotide | positions 9 and | | |
| with Spacers at | 17 are | | |
| positions 9 and 17 | substituted with | | |
| (UNC13A AON | spacers | | |
| 25_sp9sp17) | | | |
| UNC13A | Nucleosides at | 5092 | XXXXXXXXXS10XXXXXXS17XXXXXXXX |
| Oligonucleotide | positions 10 and | | |
| with Spacers at | 17 are | | |
| positions 10 and 17 | substituted with | | |
| (UNC13A AON | spacers | | |
| 25_sp10sp17) | | | |
| UNC13A | Nucleosides at | 5093 | XXXXXXXXXXS11XXXXXS17XXXXXXXX |
| Oligonucleotide | positions 11 and | | |
| with Spacers at | 17 are | | |
| positions 11 and 17 | substituted with | | |
| (UNC13A AON | spacers | | |
| 25_sp11sp17) | | | |
| UNC13A | Nucleosides at | 5094 | XXXXXXXS8XXXXXXXXXXS18XXXXXXX |
| Oligonucleotide | positions 8 and | | |
| with Spacers at | 18 are | | |
| positions 8 and 18 | substituted with | | |
| (UNC13A ATON | spacers | | |
| 25_sp8sp18) | | | |
| UNC13A | Nucleosides at | 5095 | XXXXXXXXS9XXXXXXXXS18XXXXXXX |
| Oligonucleotide | positions 9 and | | |
| with Spacers at | 18 are | | |
| positions 9 and 18 | substituted with | | |
| (UNC13A AON | spacers | | |
| 25_sp9sp18) | | | |
| UNC13A | Nucleosides at | 5096 | XXXXXXXXXS10XXXXXXXS18XXXXXXX |
| Oligonucleotide | positions 10 and | | |
| with Spacers at | 18 are | | |
| positions 10 and 18 | substituted with | | |
| (UNC13A AON | spacers | | |
| 25_sp10sp18) | | | |
| UNC13A | Nucleosides at | 5097 | XXXXXXXXXXS11XXXXXXS18XXXXXXX |
| Oligonucleotide | positions 11 and | | |
| with Spacers at | 18 are | | |
| positions 11 and 18 | substituted with | | |
| (UNC13A AON | spacers | | |
| 25_spl1sp18) | | | |
| UNC13A | Nucleosides at | 5098 | XXXXXXXXS9XXXXXXXXXS19XXXXXX |
| Oligonucleotide | positions 9 and | | |
| with Spacers at | 19 are | | |
| positions 9 and 19 | substituted with | | |
| (UNC13A AON | spacers | | |
| 25_sp9sp19) | | | |
| UNC13A | Nucleosides at | 5099 | XXXXXXXXXS10XXXXXXXXS19XXXXXX |
| Oligonucleotide | positions 10 and | | |
| with Spacers at | 19 are | | |
| positions 10 and 19 | substituted with | | |
| (UNC13A AON | spacers | | |
| 25_sp10sp19) | | | |
| UNC13A | Nucleosides at | 5100 | XXXXXXXXXXS11XXXXXXXS19XXXXXX |
| Oligonucleotide | positions 11 and | | |
| with Spacers at | 19 are | | |
| positions 11 and 19 | substituted with | | |
| (UNC13A AON | spacers | | |
| 25_sp11sp19) | | | |
| UNC13A | Nucleosides at | 5101 | XXXXXXXXS9XXXXXXXXXXS20XXXXX |
| Oligonucleotide | positions 9 and | | |
| with Spacers at | 20 are | | |
| positions 9 and 20 | substituted with | | |
| (UNC13A AON | spacers | | |
| 25_sp9sp20) | | | |
| UNC13A | Nucleosides at | 5102 | XXXXXXXXXS10XXXXXXXXXS20XXXXX |
| Oligonucleotide | positions 10 and | | |
| with Spacers at | 20 are | | |
| positions 10 and 20 | substituted with | | |
| (UNC13A AON | spacers | | |
| 25_sp10sp20) | | | |
| UNC13A | Nucleosides at | 5103 | XXXXXXXXXXS11XXXXXXXXS20XXXXX |
| Oligonucleotide | positions 11 and | | |
| with Spacers at | 20 are | | |
| positions 11 and 20 | substituted with | | |
| (UNC13A AON | spacers | | |
| 25_sp11sp20) | | | |
| UNC13A | Nucleosides at | 5104 | XXXXXXXXXS10XXXXXXXXXXS21XXXX |
| Oligonucleotide | positions 10 and | | |
| with Spacers at | 21 are | | |
| positions 10 and 21 | substituted with | | |
| (UNC13A AON | spacers | | |
| 25_sp10sp21) | | | |
| UNC13A | Nucleosides at | 5105 | XXXXXXXXXXS11XXXXXXXXXS21XXXX |
| Oligonucleotide | positions 11 and | | |
| with Spacers at | 21 are | | |
| positions 11 and 21 | substituted with | | |
| (UNC13A AON | spacers | | |
| 25_spl1sp21) | | | |
| UNC13A | Nucleosides at | 5106 | XXXS₄XXXXXXXXXXS₁₅XXXXXXXXXX |
| Oligonucleotide | positions 4 and | | |
| with Spacers at | 15 are | | |
| positions 4 and 15 | substituted with | | |
| (UNC13A AON | spacers | | |
| 25_sp4sp15) | | | |
| UNC13A | Nucleosides at | 5107 | XXXXXXS7XXXXXXXXXXXS19XXXXXX |
| Oligonucleotide | positions 7 and | | |
| with Spacers at | 19 are | | |
| positions 7 and 19 | substituted with | | |
| (UNC13A AON | spacers | | |
| 25_sp7sp19) | | | |
| UNC13A | Nucleosides at | 5108 | XXXXXXS7XXXXXXXXXXS18XXXXXXX |
| Oligonucleotide | positions 7 and | | |
| with Spacers at | 18 are | | |
| positions 7 and 18 | substituted with | | |
| (UNC13A AON | spacers | | |
| 25_sp7sp18) | | | |
| UNC13A | Nucleosides at | 5109 | XXXXXXXXS9XXXXXXXXXXXS21XXXX |
| Oligonucleotide | positions 9 and | | |
| with Spacers at | 21 are | | |
| positions 9 and 21 | substituted with | | |
| (UNC13A AON | spacers | | |
| 25_sp9sp21) | | | |

*At least one nucleoside linkage of the nucleobase sequence is selected from a phosphorothioate
linkage, an alkyl phosphate linkage, a phosphorodithioate linkage, a phosphotriester linkage, an
alkylphosphonate linkage, a 3-methoxypropyl phosphonate linkage, a methylphosphonate linkage, an
aminoalkylphosphotriester linkage, an alkylene phosphonate linkage, a phosphinate linkage, a
phosphoramidate linkage, a phosphoramidothioate linkage, a phosphorodiamidate (e.g., comprising
a phosphorodiamidate morpholino (PMO), 3′ amino ribose, or 5′ amino ribose) linkage, an
aminoalkylphosphoramidate linkage, a thiophosphoramidate linkage, a thionoalkylphosphonate
linkage, a thionoalkylphosphotriester linkage, a thiophosphate linkage, a selenophosphate
linkage, and a boranophosphate linkage.

[0281] In various embodiments, UNC13A oligonucleotides include three spacers. The inclusion of three spacers divides up the UNC13A oligonucleotide into four separate segments. In various embodiments, the three spacers are located at different positions of the UNC13A oligonucleotide such that each of the segments of the UNC13A oligonucleotide are at most 7 linked nucleosides in length. Example UNC13A AONs with three spacers are documented below in Table 4.

TABLE 4
Identification of UNC13A AONs or AON variants with three spacers. Here, each
UNC13A AON has 4 segments, where each segment has at most 7 linked nucleosides.

| | | | Sequence* (where X indicates a |
|---|---|---|---|
| | Relation to | | nucleoside of the UNC13A parent |
| | UNC13A | Sequence ID | oligonucleotide and S_{y} indicates |
| | parent | Number | presence of a Spacer where y denotes |
| Sequence name | oligonucleotide | (SEQ ID NO) | the position) (5′ → 3′) |
| UNC13A | Nucleosides | 5110 | XXXXXXXS₈XXXXXXXS₁₆XXXXXXXS₂₄X |
| Oligonucleotide | at positions 8 | | |
| with Spacers at | and 16 and 24 | | |
| positions 8 and 16 | are substituted | | |
| and 24 (UNC13A | with spacers | | |
| AON | | | |
| 25_sp8sp16sp24) | | | |
| UNC13A | Nucleosides | 5111 | XXXXXXXS₈XXXXXXXS₁₆XXXXXXS₂₃XX |
| Oligonucleotide | at positions 8 | | |
| with Spacers at | and 16 and 23 | | |
| positions 8 and 16 | are substituted | | |
| and 23 (UNC13A | with spacers | | |
| AON | | | |
| 25_sp8sp16sp23) | | | |
| UNC13A | Nucleosides | 5112 | XS₂XXXXXXXS₁₀XXXXXXXS₁₈XXXXXXX |
| Oligonucleotide | at positions 2 | | |
| with Spacers at | and 10 and 18 | | |
| positions 2 and 10 | are substituted | | |
| and 18 (UNC13A | with spacers | | |
| AON | | | |
| 25_sp8sp16sp23) | | | |
| UNC13A | Nucleosides | 5113 | XXS₃XXXXXXS₁₀XXXXXXXS₁₈XXXXXXX |
| Oligonucleotide | at positions 3 | | |
| with Spacers at | and 10 and 18 | | |
| positions 3 and 10 | are substituted | | |
| and 18 (UNC13A | with spacers | | |
| AON | | | |
| 25_sp8sp16sp23) | | | |
| UNC13A | Nucleosides | 5114 | XXXS₄XXXXXXXS₁₂XXXXXXS₁₉XXXXXX |
| Oligonucleotide | at positions 4 | | |
| with Spacers at | and 12 and 19 | | |
| positions 4 and 12 | are substituted | | |
| and 19 (UNC13A | with spacers | | |
| AON | | | |
| 25_sp4sp12sp19) | | | |
| UNC13A | Nucleosides | 5115 | XXXXXXXS₈XXXXS₁₃XXXXS₁₈XXXXXXX |
| Oligonucleotide | at positions 8 | | |
| with Spacers at | and 13 and 18 | | |
| positions 8 and 13 | are substituted | | |
| and 18 (UNC13A | with spacers | | |
| AON | | | |
| 25_sp8sp13sp18) | | | |
| UNC13A | Nucleosides | 5116 | XXXXS₅XXXXXXXS₁₃XXXXXXXS₂₁XXXX |
| Oligonucleotide | at positions 5 | | |
| with Spacers at | and 13 and 21 | | |
| positions 5 and 13 | are substituted | | |
| and 21 (UNC13A | with spacers | | |
| AON | | | |
| 25_sp5sp13sp21) | | | |
| UNC13A | Nucleosides | 5117 | XXXXXXS₇XXXXXS₁₃XXXXXS₁₉XXXXXX |
| Oligonucleotide | at positions 7 | | |
| with Spacers at | and 13 and 19 | | |
| positions 7 and 13 | are substituted | | |
| and 19 (UNC13A | with spacers | | |
| AON | | | |
| 25_sp7sp13sp19) | | | |
| UNC13A | Nucleosides | 5118 | XXXXXS₆XXXXXXS₁₃XXXXXXS₂₀XXXXX |
| Oligonucleotide | at positions 6 | | |
| with Spacers at | and 13 and 20 | | |
| positions 6 and 13 | are substituted | | |
| and 20 (UNC13A | with spacers | | |
| AON | | | |
| 25_sp6sp13sp20) | | | |
| UNC13A | Nucleosides | 5119 | XXXXXXXS₈XXS₁₁XXXXXXXS₁₉XXXXXX |
| Oligonucleotide | at positions 8 | | |
| with Spacers at | and 11 and 19 | | |
| positions 8 and 11 | are substituted | | |
| and 19 (UNC13A | with spacers | | |
| AON | | | |
| 25_sp8sp11sp19) | | | |
| UNC13A | Nucleosides | 5120 | XXXXXXXS₈XXS₁₁XXXXS₁₆XXXXXXX |
| Oligonucleotide | at positions 8 | | |
| with Spacers at | and 11 and 16 | | |
| positions 8 and 11 | are substituted | | |
| and 16 (UNC13A | with spacers | | |
| AON | | | |
| 23_sp8sp11sp16) | | | |
| UNC13A | Nucleosides | 5121 | XXXXXXS₇XXXXXXS₁₄XXXXXXXS₂₂XXX |
| Oligonucleotide | at positions 7 | | |
| with Spacers at | and 14 and 22 | | |
| positions 7 and 14 | are substituted | | |
| and 22 (UNC13A | with spacers | | |
| AON | | | |
| 23_sp7sp14sp22) | | | |

*At least one nucleoside linkage of the nucleobase sequence is selected from a phosphorothioate linkage, an alkyl phosphate linkage, a phosphorodithioate linkage, a phosphotriester linkage, an alkylphosphonate linkage, a 3-methoxypropyl phosphonate linkage, a methylphosphonate linkage, an aminoalkylphosphotriester linkage, an alkylene phosphonate linkage, a phosphinate linkage, a phosphoramidate linkage, a phosphoramidothioate linkage, a phosphorodiamidate (e.g., comprising a phosphorodiamidate morpholino (PMO), 3′ amino ribose, or 5′ amino ribose) linkage, an aminoalkylphosphoramidate linkage, a thiophosphoramidate linkage, a thionoalkylphosphonate linkage, a thionoalkylphosphotriester linkage, a thiophosphate linkage, a selenophosphate linkage, and a boranophosphate linkage.

[0282] In various embodiments, UNC13A AONs with one or more spacers are reduced in length in comparison to the UNC13A AONs described above in Tables 3B and 4. For example, such UNC13A AONs may be UNC13A oligonucleotide variants with one or more spacers. In various embodiments, the UNC13A oligonucleotide variants with one or more spacers are 23mers, 21mers, or 19mers. In various embodiments, UNC13A oligonucleotide variants include two spacers such that the UNC13A oligonucleotide variant includes three segments that are divided up by the two spacers. In various embodiments, at least one of the three segments has at most 7 linked nucleosides. In various embodiments, each of the three segments has at most 7 linked nucleosides. Example UNC13A oligonucleotide variants with one or more spacers are shown below in Table 5.

TABLE 5
Example UNC13A AON variants with two spacers. Here, each UNC13A AON variant
has 3 segments, where at least one segment has at most 7 linked nucleosides.

| | | | Sequence* (where X indicates a |
|---|---|---|---|
| | Relation to | | nucleoside of the UNC13A |
| | UNC13A | Sequence ID | oligonucleotide variant and Sy indicates |
| Sequence | oligonucleotide | Number | presence of a Spacer where y denotes the |
| name | variant | (SEQ ID NO) | position) (5′ → 3′) |
| UNC13A | N/A | 5122 | XXXXXXXXXXXXXXXXXXXXXXX (23 mer) |
| oligonucleotide | | | |
| variant (23 mer) | | | |
| UNC13A | Nucleosides at | 5123 | XXXXXXXS₈XXXXXXXS₁₆XXXXXXX |
| Variant | positions 8 and | | |
| Oligonucleotide | 16 are | | |
| (23 mer) with | substituted with | | |
| Spacers at | spacers | | |
| positions 8 and | | | |
| 16 (UNC13A | | | |
| AON variant | | | |
| 23_sp8sp16) | | | |
| UNC13A | N/A | 5124 | XXXXXXXXXXXXXXXXXXXXX |
| oligonucleotide | | | (21 mer) |
| variant (21 mer) | | | |
| UNC13A | Nucleosides at | 5125 | XXXXS₅XXXXXXS₁₂XXXXXXXXX |
| Variant | positions 5 and | | |
| Oligonucleotide | 12 are | | |
| (21 mer) with | substituted with | | |
| Spacers at | spacers | | |
| positions 5 and | | | |
| 12 (UNC13A | | | |
| AON variant | | | |
| 21_sp5sp12) | | | |
| UNC13A | Nucleosides at | 5126 | XXXXXXXS₈XXXXXXXS₁₆XXXXX |
| Variant | positions 8 and | | |
| Oligonucleotide | 16 are | | |
| (21 mer) with | substituted with | | |
| Spacers at | spacers | | |
| positions 8 and | | | |
| 16 (UNC13A | | | |
| AON variant | | | |
| 21_sp8sp16) | | | |
| UNC13A | Nucleosides at | 5127 | XXXXXS₆XXXXXXXS₁₄XXXXXXX |
| Variant | positions 6 and | | |
| Oligonucleotide | 14 are | | |
| (21 mer) with | substituted with | | |
| Spacers at | spacers | | |
| positions 6 and | | | |
| 14 (UNC13A | | | |
| AON variant | | | |
| 21_sp6sp14) | | | |
| UNC13A | Nucleosides at | 5128 | XXXXXXXS₈XXXXXS₁₄XXXXXXX |
| Variant | positions 8 and | | |
| Oligonucleotide | 14 are | | |
| (21 mer) with | substituted with | | |
| Spacers at | spacers | | |
| positions 8 and | | | |
| 14 (UNC13A | | | |
| AON variant | | | |
| 21_sp8sp14) | | | |
| UNC13A | Nucleosides at | 5129 | XXXXXS₆XXXXXXXXXXXXXS₂₀X |
| Variant | positions 6 and | | |
| Oligonucleotide | 20 are | | |
| (21 mer) with | substituted with | | |
| Spacers at | spacers | | |
| positions 8 and | | | |
| 14 (UNC13A | | | |
| AON variant | | | |
| 21_sp8sp14) | | | |
| UNC13A | N/A | 5130 | XXXXXXXXXXXXXXXXXXX |
| oligonucleotide | | | (19 mer) |
| variant (19 mer) | | | |
| UNC13A | Nucleosides at | 5131 | XXXXS₅XXXXXXS₁₂XXXXXXX |
| Variant | positions 5 and | | |
| Oligonucleotide | 12 are | | |
| (19 mer) with | substituted with | | |
| Spacers at | spacers | | |
| positions 5 and | | | |
| 12 (UNC13A | | | |
| AON variant | | | |
| 19_sp5sp12) | | | |
| UNC13A | Nucleosides at | 5132 | XXXXXXXS₈XXXXXXS₁₅XXXX |
| Variant | positions 8 and | | |
| Oligonucleotide | 15 are | | |
| (19 mer) with | substituted with | | |
| Spacers at | spacers | | |
| positions 8 and | | | |
| 15 (UNC13A | | | |
| AON variant | | | |
| 19_sp8sp15) | | | |

*At least one nucleoside linkage of the nucleobase sequence is selected from a phosphorothioate linkage, an alkyl phosphate linkage, a phosphorodithioate linkage, a phosphotriester linkage, an alkylphosphonate linkage, a 3-methoxypropyl phosphonate linkage, a methylphosphonate linkage, an aminoalkylphosphotriester linkage, an alkylene phosphonate linkage, a phosphinate linkage, a phosphoramidate linkage, a phosphoramidothioate linkage, a phosphorodiamidate (e.g., comprising a phosphorodiamidate morpholino (PMO), 3′ amino ribose, or 5′ amino ribose) linkage, an aminoalkylphosphoramidate linkage, a thiophosphoramidate linkage, a thionoalkylphosphonate linkage, a thionoalkylphosphotriester linkage, a thiophosphate linkage, a selenophosphate linkage, and a boranophosphate linkage.

[0283] In some embodiments, an antisense oligonucleotide disclosed herein (e.g., UNC13A parent oligonucleotides and/or UNC13A oligonucleotide variants) comprise one or more spacers as well as one or more locked nucleic acids (LNAs). In some embodiments, an antisense oligonucleotide disclosed herein (e.g., UNC13A parent oligonucleotides and/or UNC13A oligonucleotide variants) comprises two spacers and two LNAs. In some embodiments, an antisense oligonucleotide disclosed herein (e.g., UNC13A parent oligonucleotides and/or UNC13A oligonucleotide variants) comprises two spacers and three LNAs.

[0284] In various embodiments, a spacer and a LNA are located adjacent to one another in an antisense oligonucleotide. For example, if counting from 5′ to 3′, a LNA can be located at a 7^{th} position of the antisense oligonucleotide and a spacer can be located at a 8^{th} position of the antisense oligonucleotide. As another example, if counting from 5′ to 3′, a LNA can be located at a 9^{th} position of the antisense oligonucleotide and a spacer can be located at a 8^{th} position of the antisense oligonucleotide. As another example, if counting from 5′ to 3′, a LNA can be located at a 15^{th} position of the antisense oligonucleotide and a spacer can be located at a 16^{th} position of the antisense oligonucleotide. As another example, if counting from 5′ to 3′, a LNA can be located at a 17^{th} position of the antisense oligonucleotide and a spacer can be located at a 16^{th} position of the antisense oligonucleotide.

[0285] In particular embodiments, a first spacer is located adjacent to a first LNA and a second spacer is located adjacent to a second LNA in an antisense oligonucleotide. For example, if counting from 5′ to 3′, a first LNA can be located at a 7^{th} position of the antisense oligonucleotide, a first spacer can be located at a 8^{th} position of the antisense oligonucleotide, a second LNA can be located at a 15^{th} position of the antisense oligonucleotide, and a second spacer can be located at a 16^{th} position of the antisense oligonucleotide. As another example, if counting from 5′ to 3′, a first LNA can be located at a 7^{th} position of the antisense oligonucleotide, a first spacer can be located at a 8^{th} position of the antisense oligonucleotide, a second LNA can be located at a 17^{th} position of the antisense oligonucleotide, and a second spacer can be located at a 16^{th} position of the antisense oligonucleotide. As another example, if counting from 5′ to 3′, a first LNA can be located at a 9^{th} position of the antisense oligonucleotide, a first spacer can be located at a 8^{th} position of the antisense oligonucleotide, a second LNA can be located at a 17^{th} position of the antisense oligonucleotide, and a second spacer can be located at a 16^{th} position of the antisense oligonucleotide.

[0286] In various embodiments, one or more spacers and one or more LNAs are not located adjacent to one another in an antisense oligonucleotide. For example, if counting from 5′ to 3′, a LNA can be located at a 4^{th} position of the antisense oligonucleotide and a spacer can be located at a 8^{th} position of the antisense oligonucleotide. As example, if counting from 5′ to 3′, a LNA can be located at a 20^{th} position of the antisense oligonucleotide and a spacer can be located at a 16^{th} position of the antisense oligonucleotide. In particular embodiments, if counting from 5′ to 3′, a first LNA can be located at a 4^{th} position of the antisense oligonucleotide, a first spacer can be located at a 8^{th} position of the antisense oligonucleotide, a second LNA can be located at a 20^{th} position of the antisense oligonucleotide, and a second spacer can be located at a 16^{th} position of the antisense oligonucleotide. In particular embodiments, if counting from 5′ to 3′, a first LNA can be located at a 4^{th} position of the antisense oligonucleotide, a first spacer can be located at a 8^{th} position of the antisense oligonucleotide, a second LNA can be located at a 12^{th} position of the antisense oligonucleotide, a second spacer can be located at a 16^{th} position of the antisense oligonucleotide, and a third LNA can be located at a 20^{th} position of the antisense oligonucleotide.

### Performance of UNC13A Oligonucleotides

[0287] Generally, UNC13A oligonucleotides and/or UNC13A parent oligonucleotides (e.g., UNC13A oligonucleotides with sequences of any of SEQ ID NOs: 1-1264, SEQ ID NO: 2529-3792, SEQ ID NOs: 5066-5166, SEQ ID NOs: 5168-5202, SEQ ID NOs: 5209-5221, or SEQ ID NOs: 5235-5292) target UNC13A transcripts (for example, a UNC13A pre-mRNA) comprising a sequence that shares at least 90% (e.g., 90%, 91%, 92%, 93%, 94%, 95%, 96%, 97%, 98%, 99%, or 100%) identity to SEQ ID NO: 5057-5065 or SEQ ID NOs: 5206-5208 in order to increase, restore, rescue, or stabilize levels of expression of UNC13A mRNA that is capable of translation to produce a functional UNC13A protein (e.g., full length UNC13A). In various embodiments, UNC13A AONs can exhibit at least a 20%, 30%, 40%, 50%, 60%, 70%, 80%, or 90% increase of full length UNC13A mRNA. In various embodiments, UNC13A AONs can exhibit at least a 100%, 200%, 300%, or 400% increase of full length UNC13A mRNA. In various embodiments, UNC13A AONs can exhibit at least a 20%, 30%, 40%, 50%, 60%, 70%, 80%, or 90% reduction of mis-spliced UNC13A mRNA. In various embodiments, UNC13A AONs can exhibit at least a 20%, 30%, 40%, 50%, 60%, 70%, 80%, or 90% increase of full length UNC13A protein. In various embodiments, UNC13A AONs can exhibit at least a 100%, 200%, 300%, or 400% increase of full length UNC13A protein. In some embodiments, the percent increase of the full length UNC13A protein is an increase in comparison to a reduced level of full length UNC13A protein achieved using a TDP43 antisense oligonucleotide. For example, a TDP43 antisense oligonucleotide can be used to deplete full length UNC13A protein followed by increase of the full length UNC13A protein using a UNC13A AON.

[0288] In some embodiments, UNC13A AONs can exhibit at least a 10%, 20%, 30%, 40%, 50%, 60%, 70%, 80%, 90%, or 100% rescue of full length UNC13A protein. In some embodiments, the percent rescue of full length UNC13A refers to the % of full length UNC13A following depletion using a TDP43 antisense oligonucleotide and a treatment using UNC13A AONs in comparison to a negative control (e.g., cells that did not undergo depletion or treatment or cells that were treated with a vehicle solution).

[0289] In various embodiments, UNC13A AONs can exhibit at least a 30%, 40%, 50%, 60%, 70%, 80%, or 90% reduction of an UNC13A transcript with a cryptic exon. In various embodiments, UNC13A AONs can exhibit at least a 100% reduction of an UNC13A transcript with a cryptic exon. In various embodiments, reduction of an UNC13A transcript with a cryptic exon is measured in comparison to a level of UNC13A transcript with a cryptic exon detected using a TDP43 antisense oligonucleotide. In various embodiments, UNC13A AONs can exhibit at least a 10%, 20%, 30%, 40%, 50%, 60%, 70%, 80%, 90%, or 100% reduction of an UNC13A transcript with a cryptic exon.

### Modifications

[0290] A nucleoside is a base-sugar combination. The nucleobase (also known as base) portion of the nucleoside is normally a heterocyclic base moiety. Nucleotides are nucleosides that further include a phosphate group covalently linked to the sugar portion of the nucleoside. For those nucleosides that include a pentofuranosyl sugar, the phosphate group can be linked to the 2′,3′ or 5′ hydroxyl moiety of the sugar. Oligonucleotides are formed through the covalent linkage of adjacent nucleosides to one another, to form a linear polymeric oligonucleotide. Within the oligonucleotide structure, the phosphate groups are commonly referred to as forming the internucleoside linkages of the oligonucleotide.

[0291] Modifications to antisense compounds encompass substitutions or changes to internucleoside linkages, sugar moieties, or nucleobases. Modified antisense compounds are often preferred over native forms because of desirable properties such as, for example, enhanced cellular uptake, enhanced affinity for nucleic acid target, increased stability in the presence of nucleases, or increased activity.

[0292] Chemically modified nucleosides may also be employed to increase the binding affinity of a shortened or truncated antisense oligonucleotide for its target nucleic acid. Consequently, comparable results can often be obtained with shorter antisense compounds that have such chemically modified nucleosides.

### Modified Internucleoside Linkages

[0293] The naturally occurring internucleoside linkage of RNA and DNA is a 3′ to 5′ phosphodiester linkage. Antisense compounds having one or more modified, i.e. non-naturally occurring, internucleoside linkages are often selected over antisense compounds having naturally occurring internucleoside linkages because of desirable properties such as, for example, enhanced cellular uptake, enhanced affinity for target nucleic acids, and increased stability in the presence of nucleases.

[0294] Oligonucleotides having modified internucleoside linkages include internucleoside linkages that retain a phosphorus atom as well as internucleoside linkages that do not have a phosphorus atom. Representative phosphorus containing internucleoside linkages include, but are not limited to, phosphodiesters, phosphotriesters, methylphosphonates, phosphoramidate, and phosphorothioates. Methods of preparation of phosphorous-containing and non-phosphorous-containing linkages are well known.

[0295] In certain embodiments, antisense compounds targeted to a UNC13A nucleic acid comprise one or more modified internucleoside linkages. In certain embodiments, the modified internucleoside linkages are interspersed throughout the antisense compound. In certain embodiments, the modified internucleoside linkages are phosphorothioate linkages. In certain embodiments, each internucleoside linkage of an antisense compound is a phosphorothioate internucleoside linkage. In certain embodiments, the antisense compounds targeted to a UNC13A nucleic acid comprise at least one phosphodiester linkage and at least one phosphorothioate linkage.

### Modified Sugar Moieties

[0296] Antisense compounds can optionally contain one or more nucleosides wherein the sugar group has been modified. Such sugar modified nucleosides may impart enhanced nuclease stability, increased binding affinity, or some other beneficial biological property to the antisense compounds. In certain embodiments, nucleosides comprise chemically modified ribofuranose ring moieties. Examples of chemically modified ribofuranose rings include without limitation, addition of substituent groups (including 5′ and 2′ substituent groups, bridging of non-geminal ring atoms to form bicyclic nucleic acids (BNA), replacement of the ribosyl ring oxygen atom with S, N(R), or C(R₁)(R₂) (R, R₁ and R₂ are each independently H, C₁-C₁₂ alkyl or a protecting group) and combinations thereof. Examples of chemically modified sugars include 2′-F-5′-methyl substituted nucleoside (see PCT International Application WO 2008/101157 Published on Aug. 21, 2008 for other disclosed 5′,2′-bis substituted nucleosides) or replacement of the ribosyl ring oxygen atom with S with further substitution at the 2′-position (see published U.S. Patent Application US2005-0130923, published on Jun. 16, 2005) or alternatively 5′-substitution of a BNA (see PCT International Application WO 2007/134181 Published on Nov. 22, 2007 wherein LNA is substituted with for example a 5′-methyl or a 5′-vinyl group).

[0297] Examples of nucleosides having modified sugar moieties include without limitation nucleosides comprising 5′-vinyl, 5′-methyl (R or 5), 4′-S, 2′-F, 2′-OCH₃, 2′-OCH₂CH₃, 2′—O CH₂CH₂F and 2′-O(CH₂)₂OCH₃ substituent groups. The substituent at the 2′ position can also be selected from allyl, amino, azido, thio, O-allyl, O—C₁-C₁₀ alkyl, OCF₃, OCH₂F, O(CH₂)₂S CH₃, O(CH₂)₂—O—N(Rₘ)(Rₙ), O—CH₂—C(═O)—N(Rₘ)(Rₙ), and O—CH₂—C(═O)—N(R₁)—(CH₂)₂—N(Rₘ)(Rₙ)—, where each Rₗ, Rₘ and Rₙ is, independently, H or substituted or unsubstituted C₁-C₁₀ alkyl.

[0298] Additional examples of modified sugar moieties include a 2′-OMe modified sugar moiety, bicyclic sugar moiety, 2′-O-(2-methoxyethyl) (2′-MOE), 2′-deoxy-2′-fluoro nucleoside, 2′-fluoro-β-D-arabinonucleoside, locked nucleic acid (LNA), constrained ethyl 2′-4′-bridged nucleic acid (cEt), S-cEt, tcDNA, hexitol nucleic acids (HNA), and tricyclic analog (e.g., tcDNA).

[0299] As used herein, “bicyclic nucleosides” refer to modified nucleosides comprising a bicyclic sugar moiety. Examples of bicyclic nucleosides include without limitation nucleosides comprising a bridge between the 4′ and the 2′ ribosyl ring atoms. In certain embodiments, antisense compounds provided herein include one or more bicyclic nucleosides comprising a 4′ to 2′ bridge. Examples of such 4′ to 2′ bridged bicyclic nucleosides, include but are not limited to one of the formulae: 4′—(CH₂)—O-2′ (LNA); 4′—(CH₂)—S-2′; 4′—(CH₂)₂—O-2′ (ENA); 4′-CH(CH₃)—O-2′ and 4′-CH(CH₂OCH₃)—O-2′ (and analogs thereof see U.S. Pat. No. 7,399,845, issued on Jul. 15, 2008); 4′-C(CH₃)(CH₃)—O-2′ (and analogs thereof see published International Application WO/2009/006478, published Jan. 8, 2009); 4′—CH₂—N(OCH₃)-2′ (and analogs thereof see published International Application WO/2008/150729, published Dec. 11, 2008); 4′-CH₂—O—N(CH₃)-2′ (see published U.S. Patent Application US2004-0171570, published Sep. 2, 2004); 4′—CH₂—N(R)—O-2′, wherein R is H, C₁-C₁₂ alkyl, or a protecting group (see U.S. Pat. No. 7,427,672, issued on Sep. 23, 2008); 4′—CH₂—C(H)(CH₃)-2′ (see Chattopadhyaya et al., J. Org. Chem., 2009, 74, 118-134); and 4′—CH₂—C—(═CH₂)-2′ (and analogs thereof see published International Application WO 2008/154401, published on Dec. 8, 2008).

[0300] Further reports related to bicyclic nucleosides can also be found in published literature (see for example: Singh et al., Chem. Commun., 1998, 4, 455-456; Koshkin et al., Tetrahedron, 1998, 54, 3607-3630; Wahlestedt et al., Proc. Natl. Acad. Sci. U.S.A., 2000, 97, 5633-5638; Kumar et al., Bioorg. Med. Chem. Lett., 1998, 8, 2219-2222; Singh et al., J. Org. Chem., 1998, 63, 10035-10039; Srivastava et al., J. Am. Chem. Soc., 2007, 129(26) 8362-8379; Elayadi et al., Curr. Opinion Invest. Drugs, 2001, 2, 558-561; Braasch et al., Chem. Biol., 2001, 8, 1-7; and Orum et al., Curr. Opinion Mol. Ther., 2001, 3, 239-243; U.S. Pat. Nos. 6,268,490; 6,525,191; 6,670,461; 6,770,748; 6,794,499; 7,034,133; 7,053,207; 7,399,845; 7,547,684; and 7,696,345; U.S. Patent Publication No. US2008-0039618; US2009-0012281; U.S. patent Ser. No. 60/989,574; 61/026,995; 61/026,998; 61/056,564; 61/086,231; 61/097,787; and 61/099,844; Published PCT International applications WO 1994/014226; WO 2004/106356; WO 2005/021570; WO 2007/134181; WO 2008/150729; WO 2008/154401; and WO 2009/006478. Each of the foregoing bicyclic nucleosides can be prepared having one or more stereochemical sugar configurations including for example α-L-ribofuranose and β-D-ribofuranose (see PCT international application PCT/DK98/00393, published on Mar. 25, 1999 as WO 99/14226).

[0301] In certain embodiments, bicyclic sugar moieties of BNA nucleosides include, but are not limited to, compounds having at least one bridge between the 4′ and the 2′ position of the pentofuranosyl sugar moiety wherein such bridges independently comprises 1 or from 2 to 4 linked groups independently selected from —[C(Rₐ)(R_{b})]ₙ—, —C(Rₐ)═C(R_{b})—, —C(Rₐ)═N—, —C(═O)—, —C(═NRₐ)—, —C(═S)—, —O—, —Si(Rₐ)₂—, —S(═O)ₓ—, and —N(Rₐ)—; wherein:
[0302] x is 0, 1, or 2;
[0303] n is 1, 2, 3, or 4;
[0304] each Rₐ and R_{b} is, independently, H, a protecting group, hydroxyl, C₁-C₁₂ alkyl, substituted C₁-C₁₂ alkyl, C₂-C₁₂ alkenyl, substituted C₂-C₁₂ alkenyl, C₂-C₁₂ alkynyl, substituted C₂-C₁₂ alkynyl, C₅-C₂₀ aryl, substituted C₅-C₂₀ aryl, heterocycle radical, substituted heterocycle radical, heteroaryl, substituted heteroaryl, C₅-C₇ alicyclic radical, substituted C₅-C₇ alicyclic radical, halogen, OJ₁, NJ₁J₂, SJ₁, N₃, COOJ₁, acyl (C(═O)—H), substituted acyl, CN, sulfonyl (S(═O)₂-J₁), or sulfoxyl (S(═O)-J₁); and each J₁ and J₂ is, independently, H, C₁-C₁₂ alkyl, substituted C₁-C₁₂ alkyl, C₂-C₁₂ alkenyl, substituted C₂-C₁₂ alkenyl, C₂-C₁₂ alkynyl, substituted C₂-C₁₂ alkynyl, C₅-C₂₀ aryl, substituted C₅-C₂₀ aryl, acyl (C(═O)—H), substituted acyl, a heterocycle radical, a substituted heterocycle radical, C₁-C₁₂ aminoalkyl, substituted C₁-C₁₂ aminoalkyl or a protecting group.

[0305] In certain embodiments, the bridge of a bicyclic sugar moiety is —[C(Rₐ)(R_{b})]ₙ—, —[—[C(Rₐ)(R_{b})]ₙ—O—, —C(RₐR_{b})—N(R)—O— or —C(RₐR_{b})—O—N(R)—. In certain embodiments, the bridge is 4′—CH₂-2′,4′—(CH₂)₂-2′,4′—(CH₂)₃-2′,4′—CH₂—O-2′,4′—(CH₂)₂—O-2′,4′—CH₂—O—N(R)-2′ and 4′—CH₂—N(R)—O-2′— wherein each R is, independently, H, a protecting group or C₁-C₁₂ alkyl, each Rₐ and R_{b} is, independently, H, a protecting group, hydroxyl, C₁-C₁₂ alkyl, substituted C₁-C₁₂ alkyl, C₂-C₁₂ alkenyl, substituted C₂-C₁₂ alkenyl, C₂-C₁₂ alkynyl, substituted C₂-C₁₂ alkynyl, C₅-C₂₀ aryl, substituted C₅-C₂₀ aryl, heterocycle radical, substituted heterocycle radical, heteroaryl, substituted heteroaryl, C₅-C₇ alicyclic radical, substituted C₅-C₇ alicyclic radical, halogen, OJ₁, NJ₁J₂, SJ₁, N₃, COOJ₁, acyl (C(═O)—H), substituted acyl, CN, sulfonyl (S(═O)₂-J₁), or sulfoxyl (S(═O)-J₁); each J₁ and J₂ is, independently, H, C₁-C₁₂ alkyl, substituted C₁-C₁₂ alkyl, C₂-C₁₂ alkenyl, substituted C₂-C₁₂ alkenyl, C₂-C₁₂ alkynyl, substituted C₂-C₁₂ alkynyl, C₅-C₂₀ aryl, substituted C₅-C₂₀ aryl, acyl (C(═O)—H), substituted acyl, a heterocycle radical, a substituted heterocycle radical, C₁-C₁₂ aminoalkyl, substituted C₁-C₁₂ aminoalkyl or a protecting group; and R is H, C₁-C₁₂ alkyl, or a protecting group (see U.S. Pat. No. 7,427,672, issued on Sep. 23, 2008).

[0306] In certain embodiments, bicyclic nucleosides are further defined by isomeric configuration. For example, a nucleoside comprising a 4′-2′ methylene-oxy bridge, may be in the α-L configuration or in the β-D configuration. Previously, α-L-methyleneoxy (4′—CH₂—O-2′) BNA's have been incorporated into antisense oligonucleotides that showed antisense activity (Frieden et al., Nucleic Acids Research, 2003, 21, 6365-6372).

[0307] In certain embodiments, bicyclic nucleosides include, but are not limited to, α-L-methyleneoxy (4′—CH₂—O-2′) BNA, β-D-methyleneoxy (4′—CH₂—O-2′) BNA, ethyleneoxy (4′—(CH₂)₂—O-2) BNA, aminooxy (4′—CH₂—O—N(R)-2′) BNA, oxyamino (4′—CH₂—N(R)—O-2′) BNA, methyl(methyleneoxy) (4′-CH(CH₃)—O-2′) BNA, methylene-thio (4′—CH₂—S-2′) BNA, methylene-amino (4′—CH₂—N(R)-2′) BNA, methyl carbocyclic (4′—CH₂—CH(CH₃)-2′) BNA, and propylene carbocyclic (4′—(CH₂)₃-2′) BNA; wherein R is H, C₁-C₁₂ alkyl, or a protecting group (see U.S. Pat. No. 7,427,672, issued on Sep. 23, 2008).

[0308] The present disclosure provide, in some embodiments, methods for treating, ameliorating, or preventing a neurological disease and/or a neuropathy further include methods of administering, to a patient, a pharmaceutically acceptable composition, for example, a pharmaceutically acceptable formulation that includes one or more UNC13A oligonucleotides. UNC13A oligonucleotides can increase, restore, or stabilize UNC13A activity, for example, UNC13A activity, and/or levels of UNC13A expression, for example, UNC13A mRNA and/or protein expression.

[0309] The present disclosure also provides pharmaceutical compositions comprising a UNC13A oligonucleotide formulated together with one or more pharmaceutically or cosmetically acceptable excipients. These formulations include those suitable for oral, sublingual, intratracheal, intranasal, transdermal, pulmonary, intrathecal, intrathalamic, intracisternal, intracerebroventricular, parenteral (e.g., subcutaneous, intramuscular, intradermal, intraduodenal, or intravenous) administration, transmucosal (e.g., buccal, vaginal, and rectal), or for topical use, e.g., as part of a composition suitable for applying topically to skin and/or mucous membrane, for example, a composition in the form of a gel, a paste, a wax, a cream, a spray, a liquid, a foam, a lotion, an ointment, a topical solution, a transdermal patch, a powder, a vapor, or a tincture. Although the most suitable form of administration in any given case will depend on the degree and severity of the condition being treated and on the nature of the particular UNC13A oligonucleotide being used.

[0310] The present disclosure also provides a pharmaceutical composition comprising a UNC13A oligonucleotide or a pharmaceutically acceptable salt thereof (for example, a UNC13A AON that includes a sequence of any of SEQ ID NOs: 1-1264, SEQ ID NO: 2529-3792, SEQ ID NOs: 5066-5166, SEQ ID NOs: 5168-5202, SEQ ID NOs: 5209-5221, or SEQ ID NOs: 5235-5292).

[0311] The present disclosure also provides methods that include the use of pharmaceutical compositions comprising a UNC13A AON is formulated together with one or more pharmaceutically acceptable excipients. Exemplary compositions provided herein include compositions comprising a UNC13A AON, and one or more pharmaceutically acceptable excipients. Formulations include those suitable for oral, sublingual, intratracheal, intranasal, transdermal, pulmonary, intrathecal, intrathalamic, intracisternal, intracerebroventricular, parenteral (e.g., subcutaneous, intramuscular, intradermal, intraduodenal, or intravenous) administration, transmucosal (e.g., buccal, vaginal, and rectal), or for topical use. The most suitable form of administration in any given case will depend on the clinical symptoms, complications, or biochemical indicia of the state, disorder, disease, or condition that one is trying to prevent in a subject; the state, disorder, disease, or condition one is trying to prevent in a subject; and/or on the nature of the particular compound and/or the composition being used.

### Additional Chemically Modified UNC13A Oligonucleotides

[0312] UNC13A AONs described herein, can include chemically modified nucleosides, including modified ribonucleosides and modified deoxyribonucleosides. Chemically modified nucleosides include, but are not limited to, uracine, uridine, 2′-O-(2-methoxyethyl) modifications, for example, 2′-O-(2-methoxyethyl)guanosine, 2′-O-(2-methoxyethyl)adenosine, 2′-O-(2-methoxyethyl)cytosine, and 2′-O-(2-methoxyethyl)thymidine. In certain embodiments, mixed modalities, e.g., a combination of a UNC13A peptide nucleic acid (PNA) and a UNC13A locked nucleic acid (LNA). Chemically modified nucleosides also include, but are not limited to, locked nucleic acids (LNAs), 2′-O-methyl, 2′-fluoro, and 2′-fluoro-β-D-arabinonucleotide (FANA), and Fluoro Cyclohexenyl nucleic acid (F-CeNA) modifications. Chemically modified nucleosides that can be included in UNC13A AONs described herein are described in Johannes and Lucchino, (2018) “Current Challenges in Delivery and Cytosolic Translocation of Therapeutic RNAs” Nucleic Acid Ther. 28(3): 178-93; Rettig and Behlke, (2012) “Progress toward in vivo use of siRNAs-II” Mol Ther 20:483-512; and Khvorova and Watts, (2017) “The chemical evolution of oligonucleotide therapies of clinical utility” Nat Biotechnol., 35(3):238-48, the contents of each of which are incorporated by reference herein.

[0313] UNC13A AONs described herein can include chemical modifications that promote stabilization of an oligonucleotide's terminal 5′-phosphate and phosphatase-resistant analogs of 5′-phosphate. Chemical modifications that promote oligonucleotide terminal 5′-phosphate stabilization or which are phosphatase-resistant analogs of 5′-phosphate include, but are not limited to, 5′-methyl phosphonate, 5′-methylenephosphonate, 5′-methylenephosphonate analogs, 5′-E-vinyl phosphonate (5′-E-VP), 5′-phosphorothioate, and 5′-C-methyl analogs. Chemical modifications that promote AON terminal 5′-phosphate stabilization and phosphatase-resistant analogues of 5′-phosphate are described in Khvorova and Watts, (2017) “The chemical evolution of oligonucleotide therapies of clinical utility” Nat Biotechnol., 35(3):238-48, the contents of which are incorporated by reference herein.

[0314] In some embodiments described herein, UNC13A AONs described herein can include chemically modified nucleosides, for example, 2′ O-methyl ribonucleosides, for example, 2′ O-methyl cytidine, 2′ O-methyl guanosine, 2′ O-methyl uridine, and/or 2′ O-methyl adenosine. UNC13A AONs described herein can include one or more chemically modified bases, including a 5-methylpyrimidine, for example, 5-methylcytosine, and/or a 5-methylpurine, for example, 5-methylguanine. Chemically modified nucleosides can further include pseudo-uridine or 5′ methoxyuridine. UNC13A AONs described herein can include any of the following chemically modified nucleosides: 5-methyl-2′-O-methylcytidine, 5-methyl-2′-O-methylthymidine, 5-methylcytidine, 5-methyluridine, and/or 5-methyl 2′-deoxycytidine.

[0315] UNC13A AONs described herein can include a phosphate backbone where one or more of the oligonucleoside linkages is a phosphate linkage. UNC13A AONs described herein may include a modified oligonucleotide backbone, where one or more of the nucleoside linkages of the sequence is selected from the group consisting of a phosphorothioate linkage, a phosphorodithioate linkage, a phosphotriester linkage, an alkylphosphonate linkage, a 3-methoxypropyl phosphonate linkage, an aminoalkylphosphotriester linkage, an alkylene phosphonate linkage, a phosphinate linkage, a phosphoramidate linkage, a phosphoramidothioate linkage, a thiophosphorodiamidate linkage, a phosphorodiamidate (e.g., comprising a phosphorodiamidate morpholino (PMO), 3′ amino ribose, or 5′ amino ribose) linkage, an aminoalkylphosphoramidate linkage, a thiophosphoramidate linkage, a thionoalkylphosphonate linkage, a thionoalkylphosphotriester linkage, a thiophosphate linkage, a selenophosphate linkage, and a boranophosphate linkage. In some embodiments of UNC13A AONs described herein, at least one (i.e., one or more) internucleoside linkage of the oligonucleotide is a phosphorothioate linkage. For example, in some embodiments of UNC13A AONs described herein, one, two, three, or more internucleoside linkages of the oligonucleotide is a phosphorothioate linkage. In preferred embodiments of UNC13A AONs described herein, all internucleoside linkages of the oligonucleotide are phosphorothioate linkages. Thus, in some embodiments, all of the nucleotide linkages of a UNC13A AON of any of SEQ ID NOs: 1-1264, SEQ ID NO: 2529-3792, SEQ ID NOs: 5066-5166, SEQ ID NOs: 5168-5202, SEQ ID NOs: 5209-5221, or SEQ ID NOs: 5235-5292 are phosphorothioate linkages. In some embodiments, one or more of the nucleotide linkages of a UNC13A AON of any of SEQ ID NOs: 1-1264, SEQ ID NO: 2529-3792, SEQ ID NOs: 5066-5166, SEQ ID NOs: 5168-5202, SEQ ID NOs: 5209-5221, or SEQ ID NOs: 5235-5292 are phosphorothioate linkages.

[0316] In various embodiments, nucleotide linkages of UNC13A AON described herein such as any of SEQ ID NOs: 1-1264, SEQ ID NO: 2529-3792, SEQ ID NOs: 5066-5166, SEQ ID NOs: 5168-5202, SEQ ID NOs: 5209-5221, or SEQ ID NOs: 5235-5292 include a mix of phosphodiester and phosphorothioate linkages.

[0317] In some embodiments, nucleoside linkages linking a base at position 3 of a UNC13A AON described herein are phosphodiester bonds. For example, the base at position 3 may be linked to each adjacent base (e.g., preceding base and succeeding base) through a phosphodiester bond. An example 25mer UNC13A AON with phosphodiester bonds linking the base at position 3 can be denoted as:

XXoDoXXXXXXXXXXXXXXXXXXXXXX

where “o” represents a phosphodiester bond and “D” represents the base at position 3. Any nucleobase in the AON can be a nucleobase analog.

[0318] In some embodiments, one of the nucleoside linkages linking a base at position 3 of a UNC13A AON described herein is a phosphodiester bond. For example, the base at position 3 may be linked to either the preceding base or the succeeding base through a phosphodiester bond. An example 25mer UNC13A AON with a phosphodiester bond linking the base at position 3 to a preceding base can be denoted as:

XXoDXXXXXXXXXXXXXXXXXXXXXX

where “o” represents a phosphodiester bond and “D” represents the base at position 3. Any nucleobase in the AON can be a nucleobase analog.

[0319] An example 25mer UNC13A AON with a phosphodiester bond linking the base at position 3 to a succeeding base can be denoted as:

XXDoXXXXXXXXXXXXXXXXXXXXXX

where “o” represents a phosphodiester bond and “D” represents the base at position 3. Any nucleobase in the AON can be a nucleobase analog.

[0320] In various embodiments, in addition to one of the nucleoside linkages linking a base at position 3 of a UNC13A AON described herein being a phosphodiester bond, the UNC13A AON further includes two spacers. The two spacers can be positioned in the UNC13A AON such that the UNC13A AON includes a segment with at most 7 linked nucleosides. An example 25mer UNC13A AON with two spacers and with a phosphodiester bond linking the base at position 3 to a preceding base can be denoted as:

XxoDS₁XXXXXXXXXS2XXXXXXXXXXX

where “S₁” represents a first spacer, “S₂” represents a second spacer, “o” represents a phosphodiester bond and “D” represents the base at position 3. Any nucleobase in the AON can be a nucleobase analog.

[0321] An example 25mer UNC13A AON with two spacers and with a phosphodiester bond linking the base at position 3 to a succeeding base can be denoted as:

XXDoXXXXXXXS₁XXXXXXXXXS2XXXX

where “S₁” represents a first spacer, “S₂” represents a second spacer, “o” represents a phosphodiester bond and “D” represents the base at position 3. Any nucleobase in the AON can be a nucleobase analog.

[0322] In some embodiments, nucleoside linkages linking a base at position 4 of a UNC13A AON described herein are phosphodiester bonds. For example, the base at position 4 may be linked to each adjacent base (e.g., preceding base and succeeding base) through a phosphodiester bond. An example 25mer UNC13A AON with phosphodiester bonds linking the base at position 4 can be denoted as:

XXXoDoXXXXXXXXXXXXXXXXXXXXX

where “o” represents a phosphodiester bond and “D” represents the base at position 4. Any nucleobase in the AON can be a nucleobase analog.

[0323] In some embodiments, one of the nucleoside linkages linking a base at position 4 of a UNC13A AON described herein is a phosphodiester bond. For example, the base at position 4 may be linked to either the preceding base or the succeeding base through a phosphodiester bond. An example 25mer UNC13A AON with a phosphodiester bond linking the base at position 4 to a preceding base can be denoted as:

XXXoDXXXXXXXXXXXXXXXXXXXXX

where “o” represents a phosphodiester bond and “D” represents the base at position 4. Any nucleobase in the AON can be a nucleobase analog.

[0324] An example 25mer UNC13A AON with a phosphodiester bond linking the base at position 4 to a succeeding base can be denoted as:

XXXDoXXXXXXXXXXXXXXXXXXXXX

where “o” represents a phosphodiester bond and “D” represents the base at position 4. Any nucleobase in the AON can be a nucleobase analog.

[0325] In some embodiments, nucleoside linkages linking both bases at position 3 and position 4 of a UNC13A AON described herein are phosphodiester bonds. For example, the base at position 3 may be linked to each adjacent base (e.g., preceding base and succeeding base) through a phosphodiester bond, and the base at position 4 may be linked to each adjacent base (e.g., preceding base and succeeding base) through a phosphodiester bond. An example 25mer UNC13A AON with phosphodiester bonds linking the bases at positions 3 and 4 can be denoted as:

XXoDoEoXXXXXXXXXXXXXXXXXXXXX

where “o” represents a phosphodiester bond, “D” represents the base at position 3, and “E” represents the base at position 4. In various embodiments, all other bases of the UNC13A AON are linked through phosphorothioate bonds. Any nucleobase in the AON can be a nucleobase analog.

[0326] In various embodiments, UNC13A AON described herein include one or more spacers and phosphodiester bonds are located relative to the one or more spacers. In some embodiments, the Y number of bases immediately preceding a spacer are linked through phosphodiester bonds. In various embodiments, Y is one, two, three, four, five, six, seven, eight, nine, ten, eleven, or twelve bases. In particular embodiments, Y is two bases. For example, if the spacer is located at position 15, the bases at positions 13 and 14 of the UNC13A AON are each linked to their respective adjacent bases through phosphodiester bonds. As described herein, the spacer can be located at various positions in the UNC13A AON and therefore, the 2 bases immediately preceding the spacer can vary within the UNC13A AON depending on where the spacer is situated.

[0327] In various embodiments, the UNC13A AON may include more than one spacer. In some embodiments, only one of the spacers has Y number of bases immediately preceding the spacer that are linked through phosphodiester bonds. In such embodiments, the other spacers are linked to respective preceding bases through phosphorothioate bonds. In various embodiments, two of the spacers have Y number of bases immediately preceding the spacers that are linked through phosphodiester bonds. In various embodiments, each of the spacers in the UNC13A AON have Y number of bases immediately preceding the spacers that are linked through phosphodiester bonds. In various embodiments, all other bases of the UNC13A AON are linked through phosphorothioate bonds.

[0328] In some embodiments, Y number of bases immediately preceding a spacer and Z number of bases immediately succeeding a spacer are linked through phosphodiester bonds. In various embodiments, Y is one, two, three, four, five, six, seven, eight, nine, ten, eleven, or twelve bases. In various embodiments, Z is one, two, three, four, five, six, seven, eight, nine, ten, eleven, or twelve bases. Y and Z can be independent of each other. In particular embodiments, Y is one base and Z is one base. For example, if the spacer is located at position 15, the bases at positions 14 and 16 of the UNC13A AON are each linked to their respective adjacent bases through phosphodiester bonds. To provide an example, such a UNC13A AON (e.g., 25mer) can be denoted as:

XXXXXXXXXXXXXoDoSoEoXXXXXXXXX

where “S” represents a spacer, “o” represents a phosphodiester bond, “D” represents a base immediately preceding the spacer, and “E” represents the base immediately succeeding the spacer. Any nucleobase in the AON can be a nucleobase analog.

[0329] As described herein, the spacer can be located at various positions in the UNC13A AON and therefore, the bases immediately preceding or immediately succeeding the spacer can vary within the UNC13A AON depending on where the spacer is situated.

[0330] In various embodiments, the UNC13A AON may include more than one spacer. In some embodiments, only one of the spacers has Y number of bases immediately preceding the spacer and Z number of bases immediately succeeding the spacer that are linked through phosphodiester bonds. In such embodiments, the other spacers of the UNC13A AON are linked to respective preceding and succeeding bases through phosphorothioate bonds. To provide an example, such a UNC13A AON (e.g., 25mer) can be denoted as:

XXXXoDoS1oEoXXXXXXXXXXXS2XXXXXX

where “S₁” represents a first spacer, “S₂” represents a second spacer, “o” represents a phosphodiester bond, “D” represents a base immediately preceding the spacer, and “E” represents the base immediately succeeding the spacer. Any nucleobase in the AON can be a nucleobase analog.

[0331] As another example, such a UNC13A AON (e.g., 25mer) can be denoted as:

XXXXXS1XXXXXXXXXXXoDoS₂oDoXXXXX

where “S₁” represents a first spacer, “S₂” represents a second spacer, “o” represents a phosphodiester bond, “D” represents a base immediately preceding the spacer, and “E” represents the base immediately succeeding the spacer. Any nucleobase in the AON can be a nucleobase analog.

[0332] In some embodiments, one of the spacers is linked to the immediately preceding base through a phosphodiester bond. For example, a UNC13A AON includes a first spacer that is linked to the immediately preceding base through a phosphodiester bond, which can be denoted as:

XXXXXXoS₁XXXXXXXXXXXS₂XXXXXX

where “S₁” represents a first spacer, “S₂” represents a second spacer, “o” represents a phosphodiester bond. Any nucleobase in the AON can be a nucleobase analog.

[0333] As another example, a UNC13A AON includes a second spacer that is linked to the immediately preceding base through a phosphodiester bond, which can be denoted as:

XXXXXXS₁XXXXXXXXXXXoS₂XXXXXX

where “S₁” represents a first spacer, “S₂” represents a second spacer, “o” represents a phosphodiester bond. Any nucleobase in the AON can be a nucleobase analog.

[0334] In various embodiments, the UNC13A AON may be a AON variant (e.g., a 23mer, a 21mer, or a 19mer) where one of the spacers is linked to the immediately preceding base through a phosphodiester bond. For example, the UNC13A AON may be a 21mer with a first spacer that is linked to the immediately preceding base through a phosphodiester bond, which can be denoted as:

XXXXXXXoS₁XXXXXS₂XXXXXXX

where “S₁” represents a first spacer, “S₂” represents a second spacer, “o” represents a phosphodiester bond. Any nucleobase in the AON can be a nucleobase analog.

[0335] As another example, the UNC13A AON may be a 21mer with a second spacer that is linked to the immediately preceding base through a phosphodiester bond, which can be denoted as:

XXXXXXXS₁XXXXXoS₂XXXXXXX

where “S₁” represents a first spacer, “S₂” represents a second spacer, “o” represents a phosphodiester bond. Any nucleobase in the AON can be a nucleobase analog.

[0336] In some embodiments, the UNC13A AON may be a AON variant (e.g., a 23mer, a 21mer, or a 19mer) where one of the spacers is linked to the immediately preceding base through a phosphodiester bond and the immediately preceding base is further linked to the preceding base through a phosphodiester bond. An example 21mer UNC13A AON can be denoted as:

XXXEoDoS₁XXXXXXS₂XXXXXXX

where “S₁” represents a first spacer, “S₂” represents a second spacer, “o” represents a phosphodiester bond, “D” represents the base immediately preceding S₁ and “E” represents the base immediately preceding “D.” Any nucleobase in the AON can be a nucleobase analog.

[0337] As another example, a 21mer UNC13A AON can be denoted as:

XXXXXS₁XXXXEoDoS₂XXXXXXX

where “S₁” represents a first spacer, “S₂” represents a second spacer, “o” represents a phosphodiester bond, “D” represents the base immediately preceding S₂ and “E” represents the base immediately preceding “D.” Any nucleobase in the AON can be a nucleobase analog.

[0338] In some embodiments, the UNC13A AON may be a AON variant (e.g., a 23mer, a 21mer, or a 19mer) where a base that immediately precedes a first spacer is linked to another base through a phosphodiester bond. The base that immediately precedes the first spacer may be linked to the first spacer through a non-phosphodiester bond, such as a phosphorothioate bond. Additionally a second spacer is linked to an immediately preceding base through a phosphodiester bond. An example of a 21mer UNC13A AON can be denoted as:

XXXEoDS₁XXXXXXoS₂XXXXXXX

where “S₁” represents a first spacer, “S₂” represents a second spacer, “o” represents a phosphodiester bond, “D” represents the base immediately preceding S₁ and “E” represents the base immediately preceding “D.” Here, the base “D” is linked to the first spacer S₁ through a non-phosphodiester bond (e.g., phosphorothioate bond). Additionally, the base “D” is linked to base “E” through a phosphodiester bond. The second spacer S₂ is linked to an immediately preceding base through a phosphodiester bond. Any nucleobase in the AON can be a nucleobase analog.

[0339] Another example of such a 21mer UNC13A AON can be denoted as:

XXXXXoS₁XXXXEoDS₂XXXXXXX

where “S₁” represents a first spacer, “S₂” represents a second spacer, “o” represents a phosphodiester bond, “D” represents the base immediately preceding S₂ and “E” represents the base immediately preceding “D.” Here, the base “D” is linked to the second spacer S₂ through a non-phosphodiester bond (e.g., phosphorothioate bond). Additionally, the base “D” is linked to base “E” through a phosphodiester bond. The first spacer S₁ is linked to an immediately preceding base through a phosphodiester bond. Any nucleobase in the AON can be a nucleobase analog.

[0340] In some embodiments, one of the spacers is linked to the immediately succeeding base through a phosphodiester bond. For example, a UNC13A AON includes a first spacer that is linked to the immediately succeeding base through a phosphodiester bond, which can be denoted as:

XXXXXXS₁oXXXXXXXXXXXS₂XXXXXX

where “S₁” represents a first spacer, “S₂” represents a second spacer, “o” represents a phosphodiester bond. Any nucleobase in the AON can be a nucleobase analog.

[0341] As another example, a UNC13A AON includes a second spacer that is linked to the immediately succeeding base through a phosphodiester bond, which can be denoted as:

XXXXXXS₁XXXXXXXXXXXS₂oXXXXXX

where “S₁” represents a first spacer, “S₂” represents a second spacer, “o” represents a phosphodiester bond. Any nucleobase in the AON can be a nucleobase analog.

[0342] In various embodiments, the UNC13A AON may be a AON variant (e.g., a 23mer, a 21mer, or a 19mer) where one of the spacers is linked to the immediately succeeding base through a phosphodiester bond. For example, the UNC13A AON may be a 21mer with a first spacer that is linked to the immediately succeeding base through a phosphodiester bond, which can be denoted as:

XXXXXXXS₁oXXXXXS₂XXXXXXX

where “S₁” represents a first spacer, “S₂” represents a second spacer, “o” represents a phosphodiester bond. Any nucleobase in the AON can be a nucleobase analog.

[0343] As another example, the UNC13A AON may be a 21mer with a second spacer that is linked to the immediately succeeding base through a phosphodiester bond, which can be denoted as:

XXXXXXXS₁XXXXXS₂oXXXXXXX

where “S₁” represents a first spacer, “S₂” represents a second spacer, “o” represents a phosphodiester bond. Any nucleobase in the AON can be a nucleobase analog.

[0344] In various embodiments, two of the spacers have Y number of bases immediately preceding the spacers and Z number of bases immediately succeeding the spacers that are linked through phosphodiester bonds. In various embodiments, each of the spacers in the UNC13A AON have Y number of bases immediately preceding the spacers and Z number of bases immediately succeeding the spacers that are linked through phosphodiester bonds. An example of such a UNC13A AON (e.g., 25mer) can be denoted as:

XXXXoDoS₁oEoXXXXXXXXXXoFoS₂oHoXXXXX

where “S₁” represents a first spacer, “S₂” represents a second spacer, “o” represents a phosphodiester bond, “D” represents a base immediately preceding the first spacer, “E” represents the base immediately succeeding the first spacer, “F” represents a base immediately preceding the second spacer, and “H” represents the base immediately succeeding the second spacer. In various embodiments, all other bases of the UNC13A AON are linked through phosphorothioate bonds. Any nucleobase in the AON can be a nucleobase analog.

[0345] In various UNC13A AON includes two or more spacers and a range of bases located between the two spacers are linked through phosphodiester bonds. In various embodiments, the range of bases include two, three, four, five, six, or seven bases linked through phosphodiester bonds. In particular embodiments, the range of bases include two bases linked through phosphodiester bonds. In particular embodiments, the range of bases include four bases linked through phosphodiester bonds. In various embodiments, all other bases of the UNC13A AON are linked through phosphorothioate bonds. Any nucleobase in the AON can be a nucleobase analog.

[0346] In various embodiments, the range of bases linked through phosphodiester bonds are positioned Y number of bases succeeding the first spacer and Z number of preceding the second spacer. In various embodiments, Y is one, two, three, four, five, six, or seven bases. In various embodiments, Z is one, two, three, four, five, six, or seven bases. Y and Z can be independent on each other. Any nucleobase in the AON can be a nucleobase analog.

[0347] In particular embodiments, Y is five bases and Z is four bases. To provide an example, such a UNC13A AON (e.g., 25mer) can be denoted as:

XXXXXXXXS₁XXXXoDoEoFoHoXXXS₂XXXX

where “S₁” represents a first spacer, “S₂” represents a second spacer, and “o” represents a phosphodiester bond. The bases “D,” “E,” “F,” and “H” represent the range of bases that are linked through phosphodiester bonds. In this example, the range of bases is located five bases after the first spacer (e.g., D is positioned five bases after the first spacer) and the range of bases is located four bases preceding the second spacer (e.g., H is positioned four bases before the second spacer). Any nucleobase in the AON can be a nucleobase analog.

[0348] In particular embodiments, Y is four bases and Z is three bases. To provide an example, such a UNC13A AON (e.g., 23mer) can be denoted as:

XXXXXXXS₁XXXoDoEoXXS₂XXXXXXX

where “S₁” represents a first spacer, “S₂” represents a second spacer, and “o” represents a phosphodiester bond. The bases “D” and “E” represent the range of bases that are linked through phosphodiester bonds. In this example, the range of bases is located four bases after the first spacer (e.g., D is positioned four bases after the first spacer) and the range of bases is located three bases preceding the second spacer (e.g., E is positioned three bases before the second spacer). In various embodiments, the positions of the two spacers differ than shown above and therefore, the range of bases linked through phosphodiester bonds are differently positioned. In various embodiments, all other bases of the UNC13A AON are linked through phosphorothioate bonds. Any nucleobase in the AON can be a nucleobase analog.

[0349] In some embodiments, a disclosed UNC13A AON may have at least one modified nucleobase, e.g., 5-methylcytosine, and/or at least one methylphosphonate nucleotide, which is placed, for example, either at only one of the 5′ or 3′ ends or at both 5′ and 3′ ends or along the oligonucleotide sequence.

[0350] UNC13A AONs may include at least one modified sugar. For example, the sugar moiety of at least one nucleotide constituting the oligonucleotide is a ribose in which the 2′—OH group may be replaced by any one selected from the group consisting of OR, R, R′OR, SH, SR, NH₂, NR₂, N₃, CN, F, Cl, Br, and I (wherein R is an alkyl or aryl and R′ is an alkylene). Examples of a modified sugar moiety include a 2′-Ome modified sugar moiety, bicyclic sugar moiety, 2′-O-(2-methoxyethyl) (2′MOE or MOE), 2′-O—(N-methylacetamide), 2′-deoxy-2′-fluoro nucleoside, 2′-fluoro-β-D-arabinonucleoside, locked nucleic acid (LNA), constrained ethyl 2′-4′-bridged nucleic acid (cEt), S-cEt, tcDNA, hexitol nucleic acids (HNA), and tricyclic analog (e.g., tcDNA).

[0351] In some embodiments, UNC13A AONs comprise 2′OMe (e.g., a UNC13A AON comprising one or more 2′OMe modified sugar), 2′MOE or MOE (e.g., a UNC13A AON comprising one or more 2′MOE modified sugar), PNA (e.g., a UNC13A AON comprising one or more N-(2-aminoethyl)-glycine units linked by amide bonds or carbonyl methylene linkage as repeating units in place of a sugar-phosphate backbone), LNA (e.g., a UNC13A AON comprising one or more locked ribose, and can be a mixture of 2′-deoxy nucleotides or 2′OMe nucleotides), c-ET (e.g., a UNC13A AON comprising one or more cET sugar), cMOE (e.g., a UNC13A AON comprising one or more cMOE sugar), morpholino oligomer (e.g., a UNC13A AON comprising a backbone comprising one or more PMO), deoxy-2′-fluoro nucleoside (e.g., a UNC13A AON comprising one or more 2′-fluoro-β-D-arabinonucleoside), tcDNA (e.g., a UNC13A AON comprising one or more tcDNA modified sugar), ENA (e.g., a UNC13A AON comprising one or more ENA modified sugar), or HNA (e.g., a UNC13A AON comprising one or more HNA modified sugar). In some embodiments, a UNC13A AON comprises one or more phosphorothioate linkage, phosphodiester linkage, phosphotriester linkage, methylphosphonate linkage, phosphoramidate linkage, a phosphoramidothioate linkage, a thiophosphorodiamidate linkage, morpholino linkage, PNA linkage, or any combination of phosphorothioate linkage, phosphodiester linkage, a phosphotriester linkage, methylphosphonate linkage, phosphoramidate linkage, morpholino linkage, and PNA linkage. In some embodiments, a UNC13A AON comprises one or more phosphorothioate linkage, phosphodiester linkage, or a combination of phosphorothioate and phosphodiester linkages.

[0352] In some embodiments, UNC13A AONs with a sequence of any one of SEQ ID NOs: 1-1264, SEQ ID NOs: 2529-3792, SEQ ID NOs: 5066-5166, SEQ ID NOs: 5168-5202, SEQ ID NOs: 5209-5221, or SEQ ID NOs: 5235-5292 is a chirally controlled oligonucleotide, such as a chirally controlled oligonucleotide described in any of U.S. Pat. Nos. 9,982,257, 10,590,413, 10,724,035, 10,450,568, and PCT Publication No. WO2019200185, each of which is hereby incorporated by reference in its entirety.

[0353] For example, a UNC13A AON with a sequence of any one of SEQ ID NOs: 1-1264, SEQ ID NOs: 2529-3792, SEQ ID NOs: 5066-5166, SEQ ID NOs: 5168-5202, SEQ ID NOs: 5209-5221, or SEQ ID NOs: 5235-5292 is a chirally controlled oligonucleotide comprising a plurality of oligonucleotides of at least one type, wherein each type is defined by: 1) base sequence; 2) pattern of backbone linkages; 3) pattern of backbone chiral centers; and 4) pattern of backbone X-moieties (—X-L-R¹); wherein: the oligonucleotides of the at least one type comprise one or more phosphorothioate triester internucleotidic linkages and one or more phosphate diester linkage; the oligonucleotides of the at least one type comprise at least two consecutive modified internucleotidic linkages; and oligonucleotides of the at least one oligonucleotide type comprise one or more modified internucleotidic linkages independently having the structure of:

[chemical structure]

wherein: P* is an asymmetric phosphorus atom and is either Rp or Sp;
[0354] W is O, S or Se; each of X, Y and Z is independently —O—, —S—, —N(-L-R¹)—, or L; L is a covalent bond or an optionally substituted, linear or branched C₁-C₅₀ alkylene, wherein one or more methylene units of L are optionally and independently replaced by an optionally substituted C₁-C₆ alkylene, C₁-C₆ alkenylene, —C≡C—, —C(R′)₂—, -Cy-, —O—, —S—, —S—S—, —N(R′)—, —C(O)—, —C(S)—, —C(NR′)—, —C(O)N(R′)—, —N(R′)C(O)N(R′)—, —N(R′)C(O)—, —N(R′)C(O)O—, —OC(O)N(R′)—, —S(O)—, —S(O)₂—, —S(O)₂N(R′)—, —N(R′)S(O)₂—, —SC(O)—, —C(O)S—, —OC(O)—, or —C(O)O—; R¹ is halogen, R, or an optionally substituted C₁-C₁₀ aliphatic wherein one or more methylene units are optionally and independently replaced by an optionally substituted C₁-C₆ alkylene, C₁-C₆ alkenylene, —C≡C—, —C(R′)₂—, -Cy-, —O—, —S—, —S—S—, —N(R′)—, —C(O)—, —C(S)—, —C(NR′)—, —C(O)N(R′)—, —N(R′)C(O)N(R′)—, —N(R′)C(O)—, —N(R′)C(O)O—, —OC(O)N(R′)—, —S(O)—, —S(O)₂—, —S(O)₂N(R′)—, —N(R′)S(O)₂—, —SC(O)—, —C(O)S—, —OC(O)—, or —C(O)O—; each R′ is independently —R, —C(O)R, —CO₂R, or —SO₂R, or: two R′ on the same nitrogen are taken together with their intervening atoms to form an optionally substituted heterocyclic or heteroaryl ring, or two R′ on the same carbon are taken together with their intervening atoms to form an optionally substituted aryl, carbocyclic, heterocyclic, or heteroaryl ring; -Cy- is an optionally substituted bivalent ring selected from phenylene, carbocyclylene, arylene, heteroarylene, or heterocyclylene; each R is independently hydrogen, or an optionally substituted group selected from C₁-C₆ aliphatic, phenyl, carbocyclyl, aryl, heteroaryl, or heterocyclyl; and each

[chemical structure]

independently represents a connection to a nucleoside. In some embodiments, a UNC13A AON with a sequence of any one of SEQ ID NOs: 1-1264, SEQ ID NOs: 2529-3792, SEQ ID NOs: 5066-5166, SEQ ID NOs: 5168-5202, SEQ ID NOs: 5209-5221, or SEQ ID NOs: 5235-5292 is a chirally controlled oligonucleotide comprising certain chemical modifications (e.g., 2′F (2′ Fluoro, which contains a fluorine molecule at the 2′ ribose position (instead of 2′-hydroxyl group in an RNA monomer)), 2′-OMe, phosphorothioate linkages, lipid conjugation, etc.), as described in U.S. Pat. No. 10,450,568.

### Motor Neuron Diseases

[0355] Motor neuron diseases are a group of diseases characterized by loss of function of motor neurons that coordinate voluntary movement of muscles by the brain. Motor neuron diseases may affect upper and/or lower motor neurons, and may have sporadic or familial origins. Motor neuron diseases include amyotrophic lateral sclerosis (ALS or Lou Gehrig's disease), progressive bulbar palsy, pseudobulbar palsy, progressive muscular atrophy, primary lateral sclerosis, spinal muscular atrophy, post-polio syndrome, and ALS with frontotemporal dementia.

[0356] Symptoms of motor neuron diseases include muscle decay or weakening, muscle pain, spasms, slurred speech, difficulty swallowing, loss of muscle control, joint pain, stiff limbs, difficulty breathing, drooling, and complete loss of muscle control, including over basic functions such as breathing, swallowing, eating, speaking, and limb movement. These symptoms are also sometimes accompanied by depression, loss of memory, difficulty with planning, language deficits, altered behavior, and difficulty assessing spatial relationships and/or changes in personality.

[0357] Motor neuron diseases can be assessed and diagnosed by a clinician of skill, for example, a neurologist, using various tools and tests. For example, the presence or risk of developing a motor neuron disease can be assessed or diagnosed using blood and urine tests (for example, tests that assay for the presence of creatinine kinase), magnetic resonance imaging (MRI), electromyography (EMG), nerve conduction study (NCS), spinal tap, lumbar puncture, and/or muscle biopsy. Motor neuron diseases can be diagnosed with the aid of a physical exam and/or a neurological exam to assess motor and sensory skills, nerve function, hearing and speech, vision, coordination and balance, mental status, and changes in mood or behavior.

### Amyotrophic Lateral Sclerosis

[0358] ALS is a progressive motor neuron disease that disrupts signals to all voluntary muscles. ALS results in atrophy of both upper and lower motor neurons. Symptoms of ALS include weakening and wasting of the bulbar muscles, general and bilateral loss of strength, spasticity, muscle spasms, muscle cramps, fasciculations, slurred speech, and difficulty breathing or loss of ability to breathe. Some individuals with ALS also suffer from cognitive decline. At the molecular level, ALS is characterized by protein and RNA aggregates in the cytoplasm of motor neurons, including aggregates of the RNA-binding protein TDP43.

[0359] ALS is most common in males above 40 years of age, although it can also occur in women and children. Risk of ALS is also heightened in individuals who smoke, are exposed to chemicals such as lead, or who have served in the military. Most instances of ALS are sporadic, while only about 10% of cases are familial. Causes of ALS include sporadic or inherited genetic mutations, high levels of glutamate, protein mishandling. Genetic mutations associated with ALS include mutations in the genes SOD1, C9orf72, TARDBP, FUS, ANG, ATXN2, CHCHD10, CHMP2B, DCTN1, ErbB4, FIG4, HNRPA1, MATR3, NEFH, OPTN, PFN1, PRPH, SETX, SIGMAR1, SMN1, SPG11, SQSTM1, TBK1, TRPM7, TUBA4A, UBQLN2, VAPB, and VCP.

### Frontotemporal Dementia

[0360] Frontotemporal dementia (FTD) is a form of dementia that affects the frontal and temporal lobes of the brain. FTD includes frontotemporal lobar degeneration (FTLD). It has an earlier average age of onset than Alzheimer's disease—40 years of age. Symptoms of FTD include extreme changes in behavior and personality, speech and language problems, and movement-related symptoms such as tremor, rigidity, muscle spasm, weakness, and difficulty swallowing. Subtypes of FTD include behavior variant frontotemporal dementia (bvFTD), characterized by changes in personality and behavior, and primary progressive aphasia (PPA), which affects language skills, speaking, writing and comprehension. FTD is associated with tau protein accumulation (Pick bodies) and altered TDP43 function. About 30% of cases of FTD are familial, and no other risk factors other than family history of the disease are known. Genetic mutations associated with FTD include mutations in the genes C9orf72, Progranulin (GRN), microtubule-associated protein tau (MAPT), UBQLN2, VPC, CHMP2B, TARDBP, FUS, ITM2B, CHCHD10, SQSTM1, PSEN1, PSEN2, CTSF, CYP27A1, TBK1 and TBP.

Amyotrophic Lateral Sclerosis with Frontotemporal Dementia

[0361] Amyotrophic lateral sclerosis with frontotemporal dementia (ALS with FTD) is a clinical syndrome in which FTD and ALS occur in the same individual. Interestingly, mutations in C9orf72 are the most common cause of familial forms of ALS and FTD. Additionally, mutations in TBK1, VCP, SQSTM1, UBQLN2 and CHMP2B are also associated with ALS with FTD. Symptoms of ALS with FTD include dramatic changes in personality, as well as muscle weakness, muscle atrophy, fasciculations, spasticity, dysarthria, dysphagia, and degeneration of the spinal cord, motor neurons, and frontal and temporal lobes of the brain. At the molecular level, ALS with FTD is characterized by the accumulation of TDP-43 and/or FUS proteins. TBK1 mutations are associated with ALS, FTD, and ALS with FTD.

### Limbic-Predominant Age-Related TDP-43 Encephalopathy (LATE)

[0362] Limbic-predominant age-related TDP-43 encephalopathy (LATE) is characterized by accumulation of misfolded TDP-43 protein in the brain, specifically in the limbic system. LATE is a neurological disorder that typically manifests in older patients (e.g., greater than 80 years old). LATE can be a diagnosis for dementia and LATE often mimics the symptoms of Alzheimer's Disease including memory loss, confusion, and mood changes.

### Methods of Treatment

[0363] The disclosure contemplates, in part, treating neurological diseases including any of amyotrophic lateral sclerosis (ALS), frontotemporal dementia (FTD), Alzheimer's disease (AD), Parkinson's disease (PD), Huntington's disease, progressive supranuclear palsy (PSP), brain trauma, spinal cord injury, corticobasal degeneration (CBD), Limbic-predominant age-related TDP-43 encephalopathy (LATE), epilepsy, Cerebral Age-Related TDP-43 With Sclerosis (CARTS), facial onset sensory and motor neuronopathy, Guam Parkinson-dementia complex, multisystem proteinopathy, CTE, and synaptic diseases like autism) in a patient in need thereof comprising administering a UNC13A AON. In some embodiments, provided herein are methods for treatment of a neurological disease in a patient in need thereof, comprising administering a disclosed UNC13A AON. In some embodiments of the disclosure, an effective amount of a disclosed UNC13A oligonucleotide may be administered to a patient in need thereof to treat a neurological disease, and/or to increase, restore, or stabilize expression of UNC13A mRNA that is capable of translation to produce a functional UNC13A protein, thereby increase, restore, or stabilize UNC13A activity and/or function.

[0364] In some embodiments, treating a neurological disease comprises at least ameliorating or reducing one symptom associated with the neurological disease (for example, reducing muscle weakness in a patient with ALS). Methods of treating a neurological disease (for example, ALS, FTD, or ALS with FTD) in a patient suffering therefrom are provided, that include administering a disclosed UNC13A AON. In some embodiments, methods of slowing the progression of a neurological disease, for example, a motor neuron disease, are provided.

[0365] Provided herein are methods of treating, reducing the risk of developing, or delaying the onset of a neurological disease in a subject in need thereof comprising administering a disclosed UNC13A AON. The methods include for example, treating a subject at risk of developing a neurological disease; e.g., administering to the subject an effective amount of a disclosed UNC13A AON. Neurological diseases that can be treated in this manner include motor neuron diseases, ALS, FTD, ALS with FTD, progressive bulbar palsy, pseudobulbar palsy, progressive muscular atrophy, primary lateral sclerosis, spinal muscular atrophy, and post-polio syndrome.

[0366] Methods of preventing or treating neurological diseases (for example, PD, ALS, FTD, and ALS with FTD) form part of this disclosure. Such methods may comprise administering to a patient in need thereof or a patient at risk, a pharmaceutical preparation comprising a UNC13A AON disclosed herein. For example, a method of preventing or treating a neurological disease is provided comprising administering to a patient in need thereof a UNC13A AON disclosed herein.

[0367] Patients treated using an above method may experience an increase, restoration of, or stabilization of UNC13A mRNA expression, which is capable of translation to produce a functional UNC13A protein, of at least about 5%, 10%, 20%, 30%, 40% or even 50%, thereby increase, restore, or stabilize UNC13A activity and/or function in a target cell (for example, a motor neuron) after administering a UNC13A oligonucleotide e.g. after 1 day, 2 days, 1 week, 2 weeks, 3 weeks, 4 weeks, 5 weeks, 6 weeks, 7 weeks, 8 weeks, 1 month, 2 months, 3, months, 4 months, 5, months, or 6 months or more. In some embodiments, administering such a UNC13A oligonucleotide may be on, e.g., at least a daily basis. The UNC13A oligonucleotide may be administered orally. In some embodiments, the UNC13A oligonucleotide is administered intrathecally, intrathalamically, or intracistemally. For example, in an embodiment described herein, a UNC13A oligonucleotide is administered intrathecally, intrathalamically or intracisternally about every 3 months. The delay or amelioration of clinical manifestation of a neurological disease in a patient as a consequence of administering a UNC13A oligonucleotide disclosed here may be at least e.g., 6 months, 1 year, 18 months or even 2 years or more as compared to a patient who is not administered a UNC13A oligonucleotide, such as one disclosed herein.

[0368] UNC13A oligonucleotides can be used alone or in combination with each other whereby at least two UNC13A oligonucleotides are used together in a single composition or as part of a treatment regimen. UNC13A oligonucleotides may also be used in combination with other drugs or AON for treating neurological diseases or conditions.

[0369] In various embodiments, disclosed herein is a method for treating amyotrophic lateral sclerosis (ALS) in a subject in need thereof, the method comprising administering to the subject an oligonucleotide comprising a segment with at most 7 linked nucleosides, and wherein oligonucleotide shares at least 85% identity with any one of SEQ ID NOs: 1-1264, SEQ ID NOs: 2529-3792, SEQ ID NOs: 5066-5166, SEQ ID NOs: 5168-5202, SEQ ID NOs: 5209-5221, or SEQ ID NOs: 5235-5292, or a pharmaceutically acceptable salt thereof; wherein at least one (i.e., one or more) nucleoside linkage of the oligonucleotide is independently selected from the group consisting of: a phosphodiester linkage, a phosphorothioate linkage, an alkyl phosphate linkage, a phosphorodithioate linkage, a phosphotriester linkage, an alkylphosphonate linkage, a 3-methoxypropyl phosphonate linkage, a methylphosphonate linkage, an aminoalkylphosphotriester linkage, an alkylene phosphonate linkage, a phosphinate linkage, a phosphoramidate linkage, a phosphoramidothioate linkage, a thiophosphorodiamidate linkage, a phosphorodiamidate linkage, an aminoalkylphosphoramidate linkage, a thiophosphoramidate linkage, a thionoalkylphosphonate linkage, a thionoalkylphosphotriester linkage, a thiophosphate linkage, a selenophosphate linkage, and a boranophosphate linkage, and/or wherein at least one (i.e., one or more) nucleoside is substituted with a component selected from the group consisting of a 2′-O-(2-methoxyethyl) nucleoside, a 2′-O-methyl nucleoside, a 2′-O—(N-methylacetamide) nucleoside, a 2′-deoxy-2′-fluoro nucleoside, a 2′-fluoro-β-D-arabinonucleoside, a locked nucleic acid (LNA), a tricyclic nucleic acid, constrained methoxyethyl (cMOE), constrained ethyl (cET), and a peptide nucleic acid (PNA), optionally wherein the oligonucleotide further comprises a spacer.

[0370] In various embodiments, disclosed herein is a method for treating frontotemporal dementia (FTD) in a subject in need thereof, the method comprising administering to the subject an oligonucleotide comprising a segment with at most 7 linked nucleosides, and wherein oligonucleotide shares at least 85% identity with any one of SEQ ID NOs: 1-1264, SEQ ID NOs: 2529-3792, SEQ ID NOs: 5066-5166, SEQ ID NOs: 5168-5202, SEQ ID NOs: 5209-5221, or SEQ ID NOs: 5235-5292, or a pharmaceutically acceptable salt thereof; wherein at least one (i.e., one or more) nucleoside linkage of the oligonucleotide is independently selected from the group consisting of: a phosphodiester linkage, a phosphorothioate linkage, an alkyl phosphate linkage, a phosphorodithioate linkage, a phosphotriester linkage, an alkylphosphonate linkage, a 3-methoxypropyl phosphonate linkage, a methylphosphonate linkage, an aminoalkylphosphotriester linkage, an alkylene phosphonate linkage, a phosphinate linkage, a phosphoramidate linkage, a phosphoramidothioate linkage, a thiophosphorodiamidate linkage, a phosphorodiamidate linkage, an aminoalkylphosphoramidate linkage, a thiophosphoramidate linkage, a thionoalkylphosphonate linkage, a thionoalkylphosphotriester linkage, a thiophosphate linkage, a selenophosphate linkage, and a boranophosphate linkage, and/or wherein at least one (i.e., one or more) nucleoside is substituted with a component selected from the group consisting of a 2′-O-(2-methoxyethyl) nucleoside, a 2′-O-methyl nucleoside, a 2′-O—(N-methylacetamide) nucleoside, a 2′-deoxy-2′-fluoro nucleoside, a 2′-fluoro-β-D-arabinonucleoside, a locked nucleic acid (LNA), a tricyclic nucleic acid, constrained methoxyethyl (cMOE), constrained ethyl (cET), and a peptide nucleic acid (PNA), optionally wherein the oligonucleotide further comprises a spacer.

[0371] In various embodiments, disclosed herein is a method for treating amyotrophic lateral sclerosis (ALS) with frontotemporal dementia (FTD) in a subject in need thereof, the method comprising administering to the subject an oligonucleotide comprising a segment with at most 7 linked nucleosides, and wherein oligonucleotide shares at least 85% identity with any one of SEQ ID NOs: 1-1264, SEQ ID NOs: 2529-3792, SEQ ID NOs: 5066-5166, SEQ ID NOs: 5168-5202, SEQ ID NOs: 5209-5221, or SEQ ID NOs: 5235-5292, or a pharmaceutically acceptable salt thereof; wherein at least one (i.e., one or more) nucleoside linkage of the oligonucleotide is independently selected from the group consisting of: a phosphodiester linkage, a phosphorothioate linkage, an alkyl phosphate linkage, a phosphorodithioate linkage, a phosphotriester linkage, an alkylphosphonate linkage, a 3-methoxypropyl phosphonate linkage, a methylphosphonate linkage, an aminoalkylphosphotriester linkage, an alkylene phosphonate linkage, a phosphinate linkage, a phosphoramidate linkage, a phosphoramidothioate linkage, a thiophosphorodiamidate linkage, a phosphorodiamidate linkage, an aminoalkylphosphoramidate linkage, a thiophosphoramidate linkage, a thionoalkylphosphonate linkage, a thionoalkylphosphotriester linkage, a thiophosphate linkage, a selenophosphate linkage, and a boranophosphate linkage, and/or wherein at least one (i.e., one or more) nucleoside is substituted with a component selected from the group consisting of a 2′-O-(2-methoxyethyl) nucleoside, a 2′-O-methyl nucleoside, a 2′-O—(N-methylacetamide) nucleoside, a 2′-deoxy-2′-fluoro nucleoside, a 2′-fluoro-β-D-arabinonucleoside, a locked nucleic acid (LNA), a tricyclic nucleic acid, constrained methoxyethyl (cMOE), constrained ethyl (cET), and a peptide nucleic acid (PNA), optionally wherein the oligonucleotide further comprises a spacer.

### Treatment and Evaluation

[0372] A patient, as described herein, refers to any animal at risk for, suffering from or diagnosed with a neurological disease, including, but not limited to, mammals, primates, and humans. In certain embodiments, the patient may be a non-human mammal such as, for example, a cat, a dog, or a horse. A patient may be an individual diagnosed with a high risk of developing a neurological disease, someone who has been diagnosed with a neurological disease, someone who previously suffered from a neurological disease, or an individual evaluated for symptoms or indications of a neurological disease, for example, any of the signs or symptoms associated with neurological diseases such as: amyotrophic lateral sclerosis (ALS), frontotemporal dementia (FTD), ALS with FTD, Alzheimer's disease (AD), Parkinson's disease (PD), Huntington's disease, progressive supranuclear palsy (PSP), brain trauma, spinal cord injury, corticobasal degeneration (CBD), nerve injuries (e.g., brachial plexus injuries), neuropathies (e.g., chemotherapy induced neuropathy), TDP43 proteinopathies (e.g., chronic traumatic encephalopathy, Perry Syndrome, Dementia with Lewy body in association with Alzheimer's disease, Parkinson's disease with or without dementia, and Limbic-predominant age-related TDP-43 encephalopathy (LATE)), epilepsy, Cerebral Age-Related TDP-43 With Sclerosis (CARTS), facial onset sensory and motor neuronopathy, Guam Parkinson-dementia complex, multisystem proteinopathy, CTE, and synaptic diseases like autism.

[0373] “A patient in need,” as used herein, refers to a patient suffering from any of the symptoms or manifestations of a neurological disease, a patient who may suffer from any of the symptoms or manifestations of a neurological disease, or any patient who might benefit from a method of the disclosure for treating a neurological disease. A patient in need may include a patient who is diagnosed with a risk of developing a neurological disease, a patient who has suffered from a neurological disease in the past, or a patient who has previously been treated for a neurological disease.

[0374] “Effective amount,” as used herein, refers to the amount of an agent that is sufficient to at least partially treat a condition when administered to a patient. The therapeutically effective amount will vary depending on the severity of the condition, the route of administration of the component, and the age, weight, etc. of the patient being treated. Accordingly, an effective amount of a disclosed UNC13A oligonucleotide is the amount of the UNC13A oligonucleotide necessary to treat a neurological disease in a patient such that administration of the agent prevents a neurological disease from occurring in a subject, prevents neurological disease progression (e.g., prevents the onset or increased severity of symptoms of the neurological such as muscle weakening, spasms, or fasciculation), or relieves or completely ameliorates all associated symptoms of a neurological disease, i.e. causes regression of the disease.

[0375] Efficacy of treatment may be evaluated by means of evaluation of gross symptoms associated with a neurological disease, analysis of tissue histology, biochemical assay, imaging methods such as, for example, magnetic resonance imaging, or other known methods. For instance, efficacy of treatment may be evaluated by analyzing gross symptoms of the disease such as changes in muscle strength and control or other aspects of gross pathology associated with a neurological disease following administration, to a patient suffering from a neurological disease, a disclosed UNC13A oligonucleotide.

[0376] Efficacy of treatment may also be evaluated at the tissue or cellular level, for example, by means of obtaining a tissue biopsy (e.g., a brain, spinal, muscle, motor neuron tissue biopsy, or olfactory neurosphere cell biopsy) and evaluating gross tissue or cell morphology or staining properties. Biochemical assays that examine protein or RNA expression may also be used to evaluate efficacy of treatment. For instance, one may evaluate levels of a protein or gene product indicative of a neurological disease, in dissociated cells or non-dissociated tissue via immunocytochemical, immunohistochemical, Western blotting, or Northern blotting methods, or methods useful for evaluating RNA levels such as quantitative or semi-quantitative polymerase chain (e.g., digital PCR (DigitalPCR, dPCR, or dePCR), qPCR etc.) reaction. One may also evaluate the presence or level of expression of useful biomarkers (e.g., neurofilament light (0), neurofilament heavy (NEFH), TDP-43 or p 75 extracellular domain (p75^{ECD})) found in spinal cord fluid, cerebrospinal fluid, extracellular vesicles (for example, exosome-like cerebrospinal fluid extracellular vesicles (“CSF exosomes”), such as those described in Welton et al., (2017) “Cerebrospinal fluid extracellular vesicle enrichment for protein biomarker discovery in neurological disease; multiple sclerosis” J Extracell Vesicles, 6(1):1-10; and Street et al., (2012) “Identification and proteomic profiling of exosomes in human cerebrospinal fluid” J Transl. Med., 10:5), urine, fecal matter, lymphatic fluid, blood, plasma, or serum to evaluate disease state and efficacy of treatment. One may also evaluate the presence or level of expression of useful biomarkers found in the plasma, neuronal extracellular vesicles/exosomes. Additional measurements of efficacy may include strength duration time constant (SDTC), short interval cortical inhibition (SICI), dynamometry, accurate test of limb isometric strength (ATLIS), compound muscle action potential (CMAP), and ALSFRS-R. In certain embodiments, urinary neurotrophin receptor p75 extracellular domain (p75^{ECD}) is a disease progression and prognostic biomarker in amyotrophic lateral sclerosis (ALS). Phosphorylated neurofilament heavy chain (pNFH) in cerebrospinal fluid (CSF) predict disease status and survival in C₉ORF72-associated amyotrophic lateral sclerosis (c9ALS) patients. CSF pNFH as a prognostic biomarker for clinical trials, which will increase the likelihood of successfully developing a treatment for c9ALS.

[0377] In evaluating efficacy of treatment, suitable controls may be chosen to ensure a valid assessment. For instance, one can compare symptoms evaluated in a patient with a neurological disease following administration of a disclosed UNC13A oligonucleotide to those symptoms in the same patient prior to treatment or at an earlier point in the course of treatment or in another patient not diagnosed with the neurological disease. Alternatively, one may compare the results of biochemical or histological analysis of tissue following administration of a disclosed UNC13A oligonucleotide with those of tissue from the same patient or from an individual not diagnosed with the neurological disease or from the same patient prior to administration of the UNC13A oligonucleotide. Additionally, one may compare blood, plasma, serum, cell, urine, lymphatic fluid, spinal cord fluid, cerebrospinal fluid, or fecal samples following administration of the UNC13A oligonucleotide with comparable samples from an individual not diagnosed with the neurological disease or from the same patient prior to administration of the UNC13A oligonucleotide. In some embodiments one may compare extracellular vesicles (for example CSF exosomes), following administration of the UNC13A oligonucleotide with extracellular vesicles from an individual not diagnosed with the neurological disease or from the same patient prior to administration of the UNC13A oligonucleotide.

[0378] Validation of UNC13A oligonucleotides may be determined by direct or indirect assessment of UNC13A expression levels or activity. For instance, biochemical assays that measure UNC13A protein or RNA expression may be used to evaluate overall effect on UNC13A transcripts (for example, a UNC13A pre-mRNA) comprising a sequence that shares at least 90% (e.g., 90%, 91%, 92%, 93%, 94%, 95%, 96%, 97%, 98%, 99%, or 100%) identity to any one of SEQ ID NOs: 5057-5065 or SEQ ID NOs: 5206-5208. For instance, one may measure UNC13A protein levels in cells or tissue by Western blot to evaluate overall UNC13A levels. One may also measure UNC13A mRNA levels by means of Northern blot or quantitative polymerase chain reaction to determine overall effect on UNC13A transcripts (for example, a UNC13A pre-mRNA) comprising a sequence that shares at least 90% (e.g., 90%, 91%, 92%, 93%, 94%, 95%, 96%, 97%, 98%, 99%, or 100%) identity to any one of SEQ ID NOs: 5057-5065 or SEQ ID NOs: 5206-5208. One may also evaluate UNC13A protein levels or levels of another protein indicative of UNC13A signaling activity in dissociated cells, non-dissociated tissue, extracellular vesicles (for example, CSF exosomes), blood, serum, or fecal matter via immunocytochemical or immunohistochemical methods.

[0379] Modulation of expression levels of UNC13A transcripts (for example, a UNC13A pre-mRNA) comprising a sequence that shares at least 90% (e.g., 90%, 91%, 92%, 93%, 94%, 95%, 96%, 97%, 98%, 99%, or 100%) identity to any one of SEQ ID NOs: 5057-5065 or SEQ ID NOs: 5206-5208 may also be evaluated indirectly by measuring parameters such as autophagy, endocytosis, protein aggregation, and the presence or level of expression of useful biomarkers (e.g., neurofilament light (NEFL), neurofilament heavy (NEFH), TDP-43, or p75^{ECD} found in plasma, spinal cord fluid, cerebrospinal fluid, extracellular vesicles (for example, CSF exosomes), blood, urine, lymphatic fluid, fecal matter, or tissue to evaluate the modulation of expression of UNC13A transcripts (for example, a UNC13A pre-mRNA) comprising a sequence that shares at least 90% (e.g., 90%, 91%, 92%, 93%, 94%, 95%, 96%, 97%, 98%, 99%, or 100%) identity to any one of SEQ ID NOs: 5057-5065 or SEQ ID NOs: 5206-5208. Modulation of expression levels of UNC13A transcripts (for example, a UNC13A pre-mRNA) comprising a sequence that shares at least 90% (e.g., 90%, 91%, 92%, 93%, 94%, 95%, 96%, 97%, 98%, 99%, or 100%) identity to any one of SEQ ID NOs: 5057-5065 or SEQ ID NOs: 5206-5208 may also be evaluated indirectly by measuring parameters such as autophagy, endocytosis, protein aggregation, and the presence or level of expression of physiological biomarkers such as compound muscle action potential (CMAP). Additional measurements may include strength duration time constant (SDTC), short interval cortical inhibition (SICI), dynamometry, accurate test of limb isometric strength (ATLIS), compound muscle action potential, and ALSFRS-R. In certain embodiments, urinary neurotrophin receptor p75 extracellular domain (p75^{ECD}) is a disease progression and prognostic biomarker in amyotrophic lateral sclerosis (ALS). Phosphorylated neurofilament heavy chain (pNFH) in cerebrospinal fluid (CSF) predict disease status and survival in c9ALS patients. CSF pNFH as a prognostic biomarker for clinical trials, which will increase the likelihood of successfully developing a treatment for c9ALS.

[0380] The disclosure also provides methods of restoring expression of full length UNC13A transcripts in cells of a patient suffering from a neurological disease. Full length UNC13A transcripts may be restored in any cell in which UNC13A expression or activity occurs, including cells of the nervous system (including the central nervous system (e.g., spinal cord or brain), the peripheral nervous system, motor neurons, glial cells, astrocytes, oligodendrocytes, microglia, the brain, the brain stem, the frontal lobes, the temporal lobes, the spinal cord), the musculoskeletal system, spinal fluid, and cerebrospinal fluid. Cells of the musculoskeletal system include skeletal muscle cells (e.g., myocytes). Motor neurons include upper motor neurons and lower motor neurons.

### Pharmaceutical Compositions and Routes of Administration

[0381] The present disclosure also provides methods for treating a neurological disease via administration of a pharmaceutical composition comprising a disclosed UNC13A oligonucleotide. In another aspect, the disclosure provides a pharmaceutical composition for use in treating a neurological disease. The pharmaceutical composition may be comprised of a disclosed UNC13A oligonucleotide, and a pharmaceutically acceptable carrier. As used herein the term “pharmaceutical composition” means, for example, a mixture containing a specified amount of a therapeutic compound, e.g., a therapeutically effective amount, of a therapeutic compound in a pharmaceutically acceptable carrier to be administered to a mammal, e.g., a human, in order to treat a neurological disease. In some embodiments, described herein are pharmaceutical compositions comprising a disclosed UNC13A oligonucleotide, and a pharmaceutically acceptable carrier. In another aspect, the disclosure provides use of a disclosed UNC13A oligonucleotide in the manufacture of a medicament for treating a neurological disease. “Medicament,” as used herein, has essentially the same meaning as the term “pharmaceutical composition.”

[0382] As used herein, “pharmaceutically acceptable carrier” means buffers, carriers, and excipients suitable for use in contact with the tissues of human beings and animals without excessive toxicity, irritation, allergic response, or other problem or complication, commensurate with a reasonable benefit/risk ratio. The carrier(s) should be “acceptable” in the sense of being compatible with the other ingredients of the formulations and not deleterious to the recipient. Pharmaceutically acceptable carriers include buffers, solvents, dispersion media, coatings, isotonic and absorption delaying agents, and the like, that are compatible with pharmaceutical administration. The use of such media and agents for pharmaceutically active substances is known in the art. In one embodiment the pharmaceutical composition is administered orally and includes an enteric coating suitable for regulating the site of absorption of the encapsulated substances within the digestive system or gut. For example, an enteric coating can include an ethylacrylate-methacrylic acid copolymer.

[0383] In one embodiment, a disclosed UNC13A oligonucleotide and any pharmaceutical composition thereof may be administered by one or several routes, including topically, intrathecally, intrathalamically, intracistemally, intracerebroventricularly, parenterally, orally, rectally, buccally, sublingually, vaginally, pulmonarily, intratracheally, intranasally, transdermally, or intraduodenally. The term parenteral as used herein includes subcutaneous injections, intrapancreatic administration, intravenous, intracistemal, intracerebroventricular, intrathecal, intrathalamic, intramuscular, intraperitoneal, intrasternal injection or infusion techniques. For example, a disclosed UNC13A oligonucleotide may be administered subcutaneously to a subject. In another example, a disclosed UNC13A oligonucleotide may be administered orally to a subject. In another example, a disclosed UNC13A oligonucleotide may be administered directly to the nervous system, or specific regions or cells of the nervous system (e.g., the brain, brain stem, lower motor neurons, spinal cord, upper motor neurons) via parenteral administration, for example, a disclosed UNC13A oligonucleotide may be administered intrathecally, intrathalamically intracisternally, or intracerebroventricularly.

[0384] In various embodiments, a UNC13A oligonucleotide, for example a UNC13A AON, can be exposed to calcium-containing buffers prior to administration. Such calcium-containing buffers can mitigate toxicity adverse effects of the UNC13A oligonucleotide. Further details of exposing an example antisense oligonucleotide to calcium-containing buffers is described in Moazami, et al., Quantifying and Mitigating Motor Phenotypes Induced by Antisense Oligonucleotides in the Central Nervous System, bioRxiv 2021.02.14.431096, which is hereby incorporated by reference in its entirety.

[0385] In some embodiments, a UNC13A oligonucleotide, for example a UNC13A AON, can be encapsulated in a nanoparticle coating. It is believed that nanoparticle encapsulation prevents AON degradation and enhances cellular uptake. For example, in some embodiments a UNC13A oligonucleotide is encapsulated in a coating of a cationic polymer, for example, a synthetic polymer (e.g., poly-L-lysine, polyamidoamine, a poly(β-amino ester), and polyethyleneimine) or a naturally occurring polymer (e.g., chitosan and a protamine). In some embodiments, a UNC13A oligonucleotide is encapsulated in a lipid or lipid-like material, for example, a cationic lipid, a cationic lipid-like material, or an ionizable lipid that is positively charged only at an acidic pH. An example of a lipid nanoparticle nucleotide therapy includes Exicure's XCUR—FXN, a lipid-nanoparticle spherical nucleic acid (SNA)-based therapeutic candidate. For example, in some embodiments, a UNC13A oligonucleotide is encapsulated in a lipid nanoparticle that includes hydrophobic moieties, e.g., cholesterol and/or a polyethylene glycol (PEG) lipid.

[0386] In various embodiments, a pharmaceutical composition comprising a disclosed UNC13A oligonucleotide may further comprise a bolaamphiphilic compound. Example bolaamphiphilic compounds are described in WO2014039493A1, WO2014039500A1, WO2014039502A1, WO2014039503A1, and WO2014039504A1, each of which is hereby incorporated by reference in its entirety. In particular embodiments, a bolaamphiphilic compound is a compound according to formula I: HG² L¹ HG¹, or a pharmaceutically acceptable salt, solvate, hydrate, prodrug, stereoisomer, tautomer, isotopic variant, or N-oxide thereof, or a combination thereof; wherein: each HG¹ and HG² is independently a hydrophilic head group; and L¹ is alkylene, alkenyl, heteroalkylene, or heteroalkenyl linker; unsubstituted or substituted with C1-C20 alkyl, hydroxyl, or oxo.

[0387] In one embodiment, with respect to the bolaamphiphilic compound of formula I, the bolaamphiphilic compound is a compound according to formula II, III, IV, V, or VI:

[chemical structure]

[0388] or a pharmaceutically acceptable salt, solvate, hydrate, prodrug, stereoisomer, tautomer, isotopic variant, or N-oxide thereof, or a combination thereof, wherein:
[0389] each HG¹ and HG² is independently a hydrophilic head group;
[0390] each Z¹ and Z² is independently —C(R³)₂—, —N(R³)— or —O—;
[0391] each R^{1a}, R^{1b}, R³, and R⁴ is independently H or Ci-C₈ alkyl;
[0392] each R^{2a} and R^{2b} is independently H, Ci-C₈ alkyl, OH, alkoxy, or O-HG¹ or O-HG²; each
[0393] n8, n9, n11, and n12 is independently an integer from 1-20;
[0394] n10 is an integer from 2-20; and
[0395] each dotted bond is independently a single or a double bond.

[0396] In one embodiment, with respect to the bolaamphiphilic compound of formula I, II, III, IV, V, or VI, each HG¹ and HG² is independently selected from:

[chemical structure]

[0397] wherein: X is —NR^{5a}R^{5b}, or —N⁺R^{5a}R^{5b}R^{5c}; each R^{5a}, and R^{5b} is independently H or substituted or unsubstituted C₁-C₂₀ alkyl or R^{5a} and R^{5b} may join together to form an N containing substituted or unsubstituted heteroaryl, or substituted or unsubstituted heterocyclyl; each R^{5c} is independently substituted or unsubstituted C₁-C₂₀ alkyl; each R⁸ is independently H, substituted or unsubstituted C₁-C₂₀ alkyl, alkoxy, or carboxy; ml is 0 or 1; and each n13, n14, and n15 is independently an integer from 1-20.

[0398] In various embodiments, pharmaceutical compositions disclosed herein comprise complexes between bolaamphiphiles and pharmacologically or biologically active compounds (e.g., an UNC13A oligonucleotide disclosed herein). In various embodiments, the pharmaceutical compositions disclosed herein comprise a bolaamphiphile vesicle complexes comprising one or more bolaamphiphilic compounds and the biologically active compound is an oligonucleotide (e.g., an UNC13A oligonucleotide disclosed herein).

[0399] Pharmaceutical compositions containing a disclosed UNC13A oligonucleotide, such as those disclosed herein, can be presented in a dosage unit form and can be prepared by any suitable method. A pharmaceutical composition should be formulated to be compatible with its intended route of administration. Useful formulations can be prepared by methods well known in the pharmaceutical art. For example, see Remington's Pharmaceutical Sciences, 18^{th} ed. (Mack Publishing Company, 1990).

[0400] Pharmaceutical formulations, in some embodiments, are sterile. Sterilization can be accomplished, for example, by filtration through sterile filtration membranes. Where the composition is lyophilized, filter sterilization can be conducted prior to or following lyophilization and reconstitution.

### Parenteral Administration

[0401] The pharmaceutical compositions of the disclosure can be formulated for parenteral administration, e.g., formulated for injection via the intravenous, intracisternal, intracerebroventricular, intramuscular, subcutaneous, intrathecal, intrathalamic, intralesional, or intraperitoneal routes. The preparation of an aqueous composition, such as an aqueous pharmaceutical composition containing a disclosed UNC13A oligonucleotide, will be known to those of skill in the art in light of the present disclosure. Typically, such compositions can be prepared as injectables, either as liquid solutions or suspensions; solid forms suitable for using to prepare solutions or suspensions upon the addition of a liquid prior to injection can also be prepared; and the preparations can also be emulsified.

[0402] The pharmaceutical forms suitable for injectable use include sterile aqueous solutions or dispersions; formulations including normal saline, artificial cerebrospinal fluid, sesame oil, peanut oil or aqueous propylene glycol; and sterile powders for the extemporaneous preparation of sterile injectable solutions or dispersions. In all cases the form must be sterile and must be fluid to the extent that easy syringability exists. It must be stable under the conditions of manufacture and storage and must be preserved against the contaminating action of microorganisms, such as bacteria and fungi.

[0403] Solutions of active compounds as free base or pharmacologically acceptable salts can be prepared in water suitably mixed with a surfactant, such as hydroxypropylcellulose. Dispersions can also be prepared in glycerol, liquid polyethylene glycols, and mixtures thereof and in oils. In addition, sterile, fixed oils may be employed as a solvent or suspending medium. For this purpose any bland fixed oil can be employed including synthetic mono- or diglycerides. In addition, fatty acids such as oleic acid can be used in the preparation of injectables. The sterile injectable preparation may also be a sterile injectable solution, suspension, or emulsion in a nontoxic parenterally acceptable diluent or solvent, for example, as a solution in 1,3-butanediol. Among the acceptable vehicles and solvents that may be employed are water, Ringer's solution, U.S.P., and isotonic sodium chloride solution. In one embodiment, a disclosed UNC13A antisense oligonucleotide may be suspended in a carrier fluid comprising 1% (w/v) sodium carboxymethylcellulose and 0.1% (v/v) TWEEN™ 80. Under ordinary conditions of storage and use, these preparations contain a preservative to prevent the growth of microorganisms.

[0404] Injectable preparations, for example, sterile injectable aqueous or oleaginous suspensions may be formulated according to the known art using suitable dispersing or wetting agents and suspending agents. Generally, dispersions are prepared by incorporating the various sterilized active ingredients into a sterile vehicle which contains the basic dispersion medium and the required other ingredients from those enumerated above. Sterile injectable solutions of the disclosure may be prepared by incorporating a disclosed UNC13A antisense oligonucleotide in the required amount of the appropriate solvent with various of the other ingredients enumerated above, as required, followed by filtered sterilization. In the case of sterile powders for the preparation of sterile injectable solutions, the preferred methods of preparation are vacuum-drying and freeze-drying techniques which yield a powder of the active ingredient plus any additional desired ingredient from a previously sterile-filtered solution thereof. The injectable formulations can be sterilized, for example, by filtration through a bacteria-retaining filter.

[0405] The preparation of more, or highly concentrated solutions for intramuscular injection is also contemplated. In this regard, the use of DMSO as solvent is preferred as this will result in extremely rapid penetration, delivering high concentrations of the disclosed oligonucleotide to a small area.

[0406] Suitable preservatives for use in such a solution include benzalkonium chloride, benzethonium chloride, chlorobutanol, thimerosal and the like. Suitable buffers include boric acid, sodium and potassium bicarbonate, sodium and potassium borates, sodium and potassium carbonate, sodium acetate, sodium biphosphate and the like, in amounts sufficient to maintain the pH at between about pH 6 and pH 8, and for example, between about pH 7 and pH 7.5. Suitable tonicity agents are dextran 40, dextran 70, dextrose, glycerin, potassium chloride, propylene glycol, sodium chloride, and the like, such that the sodium chloride equivalent of the solution is in the range 0.9 plus or minus 0.2%. Suitable antioxidants and stabilizers include sodium bisulfite, sodium metabisulfite, sodium thiosulfate, thiourea and the like. Suitable wetting and clarifying agents include polysorbate 80, polysorbate 20, poloxamer 282 and tyloxapol. Suitable viscosity-increasing agents include dextran 40, dextran 70, gelatin, glycerin, hydroxyethylcellulose, hydroxymethylpropylcellulose, lanolin, methylcellulose, petrolatum, polyethylene glycol, polyvinyl alcohol, polyvinylpyrrolidone, carboxymethylcellulose and the like.

### Oral Administration

[0407] In some embodiments, contemplated herein are compositions suitable for oral delivery of a disclosed UNC13A oligonucleotide, e.g., tablets that include an enteric coating, e.g., a gastro-resistant coating, such that the compositions may deliver a UNC13A oligonucleotide to, e.g., the gastrointestinal tract of a patient.

[0408] For example, a tablet for oral administration is provided that comprises granules (e.g., is at least partially formed from granules) that include a disclosed UNC13A oligonucleotide, e.g., a UNC13A oligonucleotide represented by any SEQ ID NOs: 1-1264, SEQ ID NO: 2529-3792, SEQ ID NOs: 5066-5166, SEQ ID NOs: 5168-5202, SEQ ID NOs: 5209-5221, or SEQ ID NOs: 5235-5292 that targets a UNC13A transcript comprising a sequence that shares at least 90% (e.g., 90%, 91%, 92%, 93%, 94%, 95%, 96%, 97%, 98%, 99%, or 100%) identity to any one of SEQ ID NO: 5057-5065 or SEQ ID NOs: 5206-5208, and pharmaceutically acceptable excipients. Such a tablet may be coated with an enteric coating. Contemplated tablets may include pharmaceutically acceptable excipients such as fillers, binders, disintegrants, and/or lubricants, as well as coloring agents, release agents, coating agents, sweetening, flavoring such as wintergreen, orange, xylitol, sorbitol, fructose, and maltodextrin, and perfuming agents, preservatives and/or antioxidants.

[0409] In some embodiments, contemplated pharmaceutical formulations include an intra-granular phase that includes a disclosed UNC13A oligonucleotide, e.g., a UNC13A oligonucleotide represented by any of SEQ ID NOs: 1-1264, SEQ ID NO: 2529-3792, SEQ ID NOs: 5066-5166, SEQ ID NOs: 5168-5202, SEQ ID NOs: 5209-5221, or SEQ ID NOs: 5235-5292 that targets a UNC13A transcript comprising a sequence that shares at least 90% (e.g., 90%, 91%, 92%, 93%, 94%, 95%, 96%, 97%, 98%, 99%, or 100%) identity to any one of SEQ ID NO: 5057-5065 or SEQ ID NOs: 5206-5208, and a pharmaceutically acceptable salt. In some embodiments, contemplated pharmaceutical formulations include an intra-granular phase that includes a disclosed UNC13A oligonucleotide, e.g., a UNC13A oligonucleotide represented by any of SEQ ID NOs: 1-1264, SEQ ID NO: 2529-3792, SEQ ID NOs: 5066-5166, SEQ ID NOs: 5168-5202, SEQ ID NOs: 5209-5221, or SEQ ID NOs: 5235-5292 that targets a UNC13A transcript comprising a sequence that shares at least 90% (e.g., 90%, 91%, 92%, 93%, 94%, 95%, 96%, 97%, 98%, 99%, or 100%) identity to any one of SEQ ID NO: 5057-5065 or SEQ ID NOs: 5206-5208, and a pharmaceutically acceptable filler. For example, a disclosed UNC13A oligonucleotide and a filler may be blended together, optionally, with other excipients, and formed into granules. In some embodiments, the intragranular phase may be formed using wet granulation, e.g., a liquid (e.g., water) is added to the blended UNC13A oligonucleotide and filler, and then the combination is dried, milled and/or sieved to produce granules. One of skill in the art would understand that other processes may be used to achieve an intragranular phase.

[0410] In some embodiments, contemplated formulations include an extra-granular phase, which may include one or more pharmaceutically acceptable excipients, and which may be blended with the intragranular phase to form a disclosed formulation.

[0411] A disclosed formulation may include an intragranular phase that includes a filler. Exemplary fillers include, but are not limited to, cellulose, gelatin, calcium phosphate, lactose, sucrose, glucose, mannitol, sorbitol, microcrystalline cellulose, pectin, polyacrylates, dextrose, cellulose acetate, hydroxypropylmethyl cellulose, partially pre-gelatinized starch, calcium carbonate, and others including combinations thereof.

[0412] In some embodiments, a disclosed formulation may include an intragranular phase and/or an extragranular phase that includes a binder, which may generally function to hold the ingredients of the pharmaceutical formulation together. Exemplary binders of the disclosure may include, but are not limited to, the following: starches, sugars, cellulose or modified cellulose such as hydroxypropyl cellulose, lactose, pre-gelatinized maize starch, polyvinyl pyrrolidone, hydroxypropyl cellulose, hydroxypropylmethyl cellulose, low substituted hydroxypropyl cellulose, sodium carboxymethyl cellulose, methyl cellulose, ethyl cellulose, sugar alcohols and others including combinations thereof.

[0413] Contemplated formulations, e.g., that include an intragranular phase and/or an extragranular phase, may include a disintegrant such as but not limited to, starch, cellulose, crosslinked polyvinyl pyrrolidone, sodium starch glycolate, sodium carboxymethyl cellulose, alginates, corn starch, crosmellose sodium, crosslinked carboxymethyl cellulose, low substituted hydroxypropyl cellulose, acacia, and others including combinations thereof. For example, an intragranular phase and/or an extragranular phase may include a disintegrant.

[0414] In some embodiments, a contemplated formulation includes an intra-granular phase comprising a disclosed UNC13A oligonucleotide and excipients chosen from: mannitol, microcrystalline cellulose, hydroxypropylmethyl cellulose, and sodium starch glycolate or combinations thereof, and an extra-granular phase comprising one or more of: microcrystalline cellulose, sodium starch glycolate, and magnesium stearate or mixtures thereof.

[0415] In some embodiments, a contemplated formulation may include a lubricant, e.g. an extra-granular phase may contain a lubricant. Lubricants include but are not limited to talc, silica, fats, stearin, magnesium stearate, calcium phosphate, silicone dioxide, calcium silicate, calcium phosphate, colloidal silicon dioxide, metallic stearates, hydrogenated vegetable oil, corn starch, sodium benzoate, polyethylene glycols, sodium acetate, calcium stearate, sodium lauryl sulfate, sodium chloride, magnesium lauryl sulfate, talc, and stearic acid.

[0416] In some embodiments, the pharmaceutical formulation comprises an enteric coating. Generally, enteric coatings create a barrier for the oral medication that controls the location at which the drug is absorbed along the digestive track. Enteric coatings may include a polymer that disintegrates at different rates according to pH. Enteric coatings may include for example, cellulose acetate phthalate, methyl acrylate-methacrylic acid copolymers, cellulose acetate succinate, hydroxypropylmethyl cellulose phthalate, methyl methacrylate-methacrylic acid copolymers, ethylacrylate-methacrylic acid copolymers, methacrylic acid copolymer type C, polyvinyl acetate-phthalate, and cellulose acetate phthalate.

[0417] Exemplary enteric coatings include Opadry® AMB, Acryl-EZE®, Eudragit® grades. In some embodiments, an enteric coating may comprise about 5% to about 10%, about 5% to about 20%, 8% to about 15%, about 8% to about 20%, about 10% to about 20%, or about 12% to about 20%, or about 18% of a contemplated tablet by weight. For example, enteric coatings may include an ethylacrylate-methacrylic acid copolymer.

[0418] For example, in a contemplated embodiment, a tablet is provided that comprises or consists essentially of about 0.5% to about 70%, e.g., about 0.5% to about 10%, or about 1% to about 20%, by weight of a disclosed UNC13A oligonucleotide or a pharmaceutically acceptable salt thereof. Such a tablet may include for example, about 0.5% to about 60% by weight of mannitol, e.g., about 30% to about 50% by weight mannitol, e.g., about 40% by weight mannitol; and/or about 20% to about 40% by weight of microcrystalline cellulose, or about 10% to about 30% by weight of microcrystalline cellulose. For example, a disclosed tablet may comprise an intragranular phase that includes about 30% to about 60%, e.g. about 45% to about 65% by weight, or alternatively, about 5 to about 10% by weight of a disclosed UNC13A oligonucleotide, about 30% to about 50%, or alternatively, about 5% to about 15% by weight mannitol, about 5% to about 15% microcrystalline cellulose, about 0% to about 4%, or about 1% to about 7% hydroxypropylmethylcellulose, and about 0% to about 4%, e.g., about 2% to about 4% sodium starch glycolate by weight.

[0419] In another contemplated embodiment, a pharmaceutical tablet formulation for oral administration of a disclosed UNC13A oligonucleotide comprises an intra-granular phase, wherein the intra-granular phase includes a disclosed UNC13A AON or a pharmaceutically acceptable salt thereof (such as a sodium salt), and a pharmaceutically acceptable filler, and which may also include an extra-granular phase, that may include a pharmaceutically acceptable excipient such as a disintegrant. The extra-granular phase may include components chosen from microcrystalline cellulose, magnesium stearate, and mixtures thereof. The pharmaceutical composition may also include an enteric coating of about 12% to 20% by weight of the tablet. For example, a pharmaceutically acceptable tablet for oral use may comprise about 0.5% to 10% by weight of a disclosed UNC13A AON, e.g., a disclosed UNC13A AON or a pharmaceutically acceptable salt thereof, about 30% to 50% by weight mannitol, about 10% to 30% by weight microcrystalline cellulose, and an enteric coating comprising an ethylacrylate-methacrylic acid copolymer.

[0420] In another example, a pharmaceutically acceptable tablet for oral use may comprise an intra-granular phase, comprising about 5 to about 10% by weight of a disclosed UNC13A AON, e.g., a disclosed UNC13A AON or a pharmaceutically acceptable salt thereof, about 40% by weight mannitol, about 8% by weight microcrystalline cellulose, about 5% by weight hydroxypropylmethyl cellulose, and about 2% by weight sodium starch glycolate; an extra-granular phase comprising about 17% by weight microcrystalline cellulose, about 2% by weight sodium starch glycolate, about 0.4% by weight magnesium stearate; and an enteric coating over the tablet comprising an ethylacrylate-methacrylic acid copolymer.

[0421] In some embodiments the pharmaceutical composition may contain an enteric coating comprising about 13% or about 15%, 16%, 17% or 18% by weight, e.g., AcyrlEZE® (see, e.g., PCT Publication No. WO 2010/054826, which is hereby incorporated by reference in its entirety).

[0422] The rate at which the coating dissolves and the active ingredient is released is its dissolution rate. In an embodiment, a contemplated tablet may have a dissolution profile, e.g., when tested in a USP/EP Type 2 apparatus (paddle) at 100 rpm and 37° C. in a phosphate buffer with a pH of 7.2, of about 50% to about 100% of the UNC13A oligonucleotide releasing after about 120 minutes to about 240 minutes, for example after 180 minutes. In another embodiment, a contemplated tablet may have a dissolution profile, e.g., when tested in a USP/EP Type 2 apparatus (paddle) at 100 rpm and 37° C. in diluted HCl with a pH of 1.0, where substantially none of the UNC13A oligonucleotide is released after 120 minutes. A contemplated tablet, in another embodiment, may have a dissolution profile, e.g., when tested in USP/EP Type 2 apparatus (paddle) at 100 rpm and 37° C. in a phosphate buffer with a pH of 6.6, of about 10% to about 30%, or not more than about 50% of the UNC13A oligonucleotide releasing after 30 minutes.

[0423] In some embodiments, methods provided herein may further include administering at least one other agent that is directed to treatment of diseases and disorders disclosed herein. In one embodiment, contemplated other agents may be co-administered (e.g., sequentially or simultaneously).

### Dosage and Frequency of Administration

[0424] The dosage or amounts described below refer either to the oligonucleotide or a pharmaceutically acceptable salt thereof.

[0425] In some embodiments, methods described herein include administering at least 1 μg, at least 5 μg, at least 10 μg, at least 20 μg, at least 30 μg, at least 40 μg, at least 50 μg, at least 60 μg, at least 70 μg, at least 80 μg, at least 90 μg, or at least 100 μg of a UNC13A antisense oligonucleotide e.g., a UNC13A oligonucleotide. In some embodiments, methods include administering from 10 mg to 500 mg, from 1 mg to 10 mg, from 10 mg to 20 mg, from 20 mg to 30 mg, from 30 mg to 40 mg, from 40 mg to 50 mg, from 50 mg to 60 mg, from 60 mg to 70 mg, from 70 mg to 80 mg, from 80 mg to 90 mg, from 90 mg to 100 mg, from 100 mg to 150 mg, from 150 mg to 200 mg, from 200 mg to 250 mg, from 250 mg to 300 mg, from 300 mg to 350 mg, from 350 mg to 400 mg, from 400 mg to 450 mg, from 450 mg to 500 mg, from 500 mg to 600 mg, from 600 mg to 700 mg, from 700 mg to 800 mg, from 800 mg to 900 mg, from 900 mg to 1 g, from 1 mg to 50 mg, from 20 mg to 40 mg, or from 1 mg to 500 mg of a UNC13A antisense oligonucleotide.

[0426] In some embodiments, methods described herein include administering formulations that include about 10 mg, 15 mg, 20 mg, 25 mg, 30 mg, 35 mg, 40 mg, 50 mg, 60 mg, 70 mg, 80 mg, 90 mg, 100 mg, 110 mg, 120 mg, 130 mg, 140 mg, 150 mg, 160 mg, 170 mg, 180 mg, 190 mg, 200 mg, 250 mg, 300 mg, 350 mg, 400 mg, 450 mg, 500 mg, 600 mg, 700 mg, 800 mg, 900 mg, 1 g, 1.5 g, 2.0 g, 2.5 g, 3.0 g, 3.5 g, 4.0 g, 4.5 g, or 5.0 g of a disclosed UNC13A oligonucleotide. In some embodiments, a formulation may include about 40 mg, 80 mg, or 160 mg of a disclosed UNC13A oligonucleotide. In some embodiments, a formulation may include at least 100 μg of a disclosed UNC13A oligonucleotide. For example, formulations may include about 0.1 mg, 0.2 mg, 0.3 mg, 0.4 mg, 0.5 mg, 1 mg, 5 mg, 10 mg, 15 mg, 20 mg, 25 mg, or 30 mg of a disclosed UNC13A oligonucleotide. The amount administered will depend on variables such as the type and extent of disease or indication to be treated, the overall health and size of the patient, the in vivo potency of the UNC13A oligonucleotide, the pharmaceutical formulation, and the route of administration. The initial dosage can be increased beyond the upper level in order to rapidly achieve the desired blood-level or tissue level. Alternatively, the initial dosage can be smaller than the optimum, and the dosage may be progressively increased during the course of treatment. Human dosage can be optimized, e.g., in a conventional Phase I dose escalation study. Dosing frequency can vary, depending on factors such as route of administration, dosage amount and the disease being treated. Exemplary dosing frequencies are once per day, once per week and once every two weeks. In some embodiments, dosing is once per day for 7 days. In some embodiments, dosing is once every 4 weeks, once every 5 weeks, once every 6 weeks, once every 7 weeks, once every 8 weeks, once every 9 weeks, once every 10 weeks, once every 11 weeks, or once every 12 weeks. In some embodiments, dosing is once a month to every three months. In some embodiments, dosing is once every 2 weeks for three dose, then monthly, bimonthly, or every three or four months.

### Combination Therapies

[0427] In various embodiments, a UNC13A AON as disclosed herein can be administered in combination with one or more additional therapies. The combination therapy of the disclosed oligonucleotide and the one or more additional therapies can, in some embodiments, be synergistic in treating any of amyotrophic lateral sclerosis (ALS), frontotemporal dementia (FTD), ALS with FTD, Alzheimer's disease (AD), Parkinson's disease (PD), Huntington's disease, progressive supranuclear palsy (PSP), brain trauma, spinal cord injury, corticobasal degeneration (CBD), nerve injuries (e.g., brachial plexus injuries), neuropathies (e.g., chemotherapy induced neuropathy), TDP43 proteinopathies (e.g., chronic traumatic encephalopathy, Perry Syndrome, Dementia with Lewy body in association with Parkinson's disease, Parkinson's disease with or without dementia, and Limbic-predominant age-related TDP-43 encephalopathy (LATE)), epilepsy, Cerebral Age-Related TDP-43 With Sclerosis (CARTS), facial onset sensory and motor neuronopathy, Guam Parkinson-dementia complex, multisystem proteinopathy, CTE, and synaptic diseases like autism.

[0428] Non-limiting examples of therapies for Parkinson's disease (PD) include: deep brain stimulation, levodopa and carbidopa (duopa, rytary, Sinemet, inbrija), istradefylline (nourianz), safinamide (xadago), pramipexole (Mirapex), rotigotine (neupro), ropinirole (requip), amantadine (gocovri, Symmetrel, osmolex), benztropine (Cogentin), trihexyphenidyl (artane), selegiline (eldepryl, zelapar), rasagiline, entacapone (comtan), opicapone (ongentys), tolcapone (tasmar), apomorphine (apokyn, kynmobi), exenatide, lingzhi, BIIB054, BIIB094, Caffeine, sarizotan, Nuplazid, and embryonic dopamine cell implantation.

[0429] Non-limiting examples of therapies for Alzheimer's disease (AD) include aducanamab (Aduhlem), memantine (Namenda), Donepezil (Aricept), Rivastigmine (Exelon), Galantamine (razadyne), Namzeric, Suvorexant (belsomra), and lecanemab.

[0430] A non-limiting example of a therapy for amyotrophic lateral sclerosis (ALS) is pridopidine.

[0431] Non-limiting examples of therapies for frontotemporal dementia (FTD) include olanzapine (Zyprexa), quetiapine (Seroquel), SSRIs (citalopram (Cipramil), dapoxetine (Priligy), escitalopram (Cipralex), fluoxetine (Prozac or Oxactin), fluvoxamine (Faverin), paroxetine (Seroxat), sertraline (Lustral), vortioxetine (Brintellix)), divalproex sodium (Depakote), carbamazepine (Tegretol), and medroxyprogestrone.

[0432] Non-limiting examples of therapies for epilepsy include Brivaracetam (briviact), cannabidiol (epidiolex), carbamazepine (carbatrol, Tegretol), cenobamate (xcopri), diazepam (valium), lorazepam (Ativan), clonazepam (klonopin), eslicarbazepine (aptiom), ethosuximide (zarontin), felbamate (felbatol), fenfluramine (fintepla), lacosamide (VIMPAT), lamotrigine (Lamictal), levetiracetam (Keppra), oxcarbazepine (oxtellar xr, Trileptal), perampanel (fycompa), phenobarbital, phenytoin (dilantin), pregabalin (lyrica), tiagabine (gabitril), topiramate (topamax), valproate (depakene, depakote), and zonisamide (zonegran).

[0433] Example additional therapies include any of Riluzole (Rilutek), PrimeC, Edaravone (Radicava), rivastigmine, donepezil, galantamine, selective serotonin reuptake inhibitor, antipsychotic agents, cholinesterase inhibitors, memantine, benzodiazepine antianxiety drugs, AMX0035 (ELYBRIO), ZILUCOPLAN (RA101495), pridopidine, dual AON intrathecal administration (e.g., BIIB067, BIIB078, and BIIB105), BIIB100, levodopa/carbidopa, dopaminergic agents (e.g., ropinirole, pramipexole, rotigotine), medroxyprosterone, KCNQ2/KCNQ3 openers (e.g., retigabine, XEN1101, or QRL-101), bioactive scaffolds, anticonvulsants and psychostimulant agents. Additional therapies can further include breathing care, physical therapy, occupational therapy, speech therapy, and nutritional support. Further non-limiting examples of additional therapies include any of deep brain stimulation, levodopa and carbidopa (duopa, rytary, Sinemet, inbrija), istradefylline (nourianz), safinamide (xadago), pramipexole (Mirapex), rotigotine (neupro), ropinirole (requip), amantadine (gocovri, Symmetrel, osmolex), benztropine (Cogentin), trihexyphenidyl (artane), selegiline (eldepryl, zelapar), rasagiline, entacapone (comtan), opicapone (ongentys), tolcapone (tasmar), apomorphine (apokyn, kynmobi), exenatide, lingzhi, BIIB054, BIIB094, Caffeine, sarizotan, embryonic dopamine cell implantation, aducanamab (Aduhlem), memantine (Namenda), Donepezil (Aricept), Rivastigmine (Exelon), Galantamine (razadyne), Namzeric, Suvorexant (belsomra), lecanemab, olanzapine (Zyprexa), quetiapine (Seroquel), SSRIs (citalopram (Cipramil), dapoxetine (Priligy), escitalopram (Cipralex), fluoxetine (Prozac or Oxactin), fluvoxamine (Faverin), paroxetine (Seroxat), sertraline (Lustral), vortioxetine (Brintellix))), divalproex sodium (Depakote), carbamazepine (Tegretol), medroxyprogestrone, Brivaracetam (briviact), cannabidiol (epidiolex), carbamazepine (carbatrol, Tegretol), cenobamate (xcopri), diazepam (valium), lorazepam (Ativan), clonazepam (klonopin), eslicarbazepine (aptiom), ethosuximide (zarontin), felbamate (felbatol), fenfluramine (fintepla), lacosamide (VIMPAT), lamotrigine (Lamictal), levetiracetam (Keppra), oxcarbazepine (oxtellar xr, Trileptal), perampanel (fycompa), phenobarbital, phenytoin (dilantin), pregabalin (lyrica), tiagabine (gabitril), topiramate (topamax), valproate (depakene, depakote), and zonisamide (zonegran). In various embodiments, an additional therapy can be a second antisense oligonucleotide. As an example, the second antisense oligonucleotide may target a UNC13A transcript (e.g., UNC13A pre-mRNA, mature UNC13A mRNA) to modulate the expression levels of full length UNC13A protein.

[0434] Non-limiting examples of therapies for spinal cord injury includes bioactive scaffolds, such as bioactive scaffolds with enhanced supramolecular motion. Further details of example bioactive scaffolds as therapies for spinal cord injury is described in Alvarez et al., “Bioactive scaffolds with enhanced supramolecular motion promote recovery from spinal cord injury.” Science, 374, 848-856 (2021), which is hereby incorporated by reference in its entirety.

[0435] In various embodiments, the disclosed oligonucleotide and the one or more additional therapies can be conjugated to one another and provided in a conjugated form. Further description regarding conjugates involving the disclosed oligonucleotide is described below. In various embodiments, the disclosed oligonucleotide and one or more additional therapies are provided concurrently. In various embodiments, the disclosed oligonucleotide and one or more additional therapies are provided simultaneously. In various embodiments, the disclosed oligonucleotide and one or more additional therapies are provided sequentially.

### Conjugates

[0436] In certain embodiments, provided herein are oligomeric compounds, which comprise an oligonucleotide (e.g., UNC13A oligonucleotide) and optionally one or more conjugate groups and/or terminal groups. Conjugate groups include one or more conjugate moiety and a conjugate linker which links the conjugate moiety to the oligonucleotide. Conjugate groups may be attached to either or both ends of an oligonucleotide and/or at any internal position. In certain embodiments, conjugate groups are attached to the 2′-position of a nucleoside of a modified oligonucleotide. In certain embodiments, conjugate groups that are attached to either or both ends of an oligonucleotide are terminal groups. In certain such embodiments, conjugate groups or terminal groups are attached at the 3′ and/or 5′-end of oligonucleotides. In certain such embodiments, conjugate groups (or terminal groups) are attached at the 3′-end of oligonucleotides. In certain embodiments, conjugate groups are attached near the 3′-end of oligonucleotides. In certain embodiments, conjugate groups (or terminal groups) are attached at the 5′-end of oligonucleotides. In certain embodiments, conjugate groups are attached near the 5′-end of oligonucleotides.

[0437] Examples of terminal groups include but are not limited to conjugate groups, capping groups, phosphate moieties, protecting groups, modified or unmodified nucleosides, and two or more nucleosides that are independently modified or unmodified.

### Conjugate Groups

[0438] In certain embodiments, a UNC13A AON is covalently attached to one or more conjugate groups. In certain embodiments, conjugate groups modify one or more properties of the attached oligonucleotide, including but not limited to pharmacodynamics, pharmacokinetics, stability, binding, absorption, tissue distribution, cellular distribution, cellular uptake, charge, and clearance. In particular embodiments, conjugate groups modify the circulation time (e.g., increase) of the oligonucleotides in the bloodstream such that increased concentrations of the oligonucleotides are delivered to the brain. In particular embodiments, conjugate groups modify the residence time (e.g., increase residence time) of the oligonucleotides in a target organ (e.g., brain) such that increased residence time of the oligonucleotides improves their performance (e.g., efficacy). In particular embodiments, conjugate groups increase the delivery of the oligonucleotide to the brain through the blood brain barrier and/or brain parenchyma (e.g., through receptor mediated transcytosis). In particular embodiments, conjugate groups enable the oligonucleotide to target a specific organ (e.g., the brain). In certain embodiments, conjugate groups impart a new property on the attached oligonucleotide, e.g., fluorophores or reporter groups that enable detection of the oligonucleotide. Certain conjugate groups and conjugate moieties have been described previously, for example: cholesterol moiety (Letsinger et al., Proc. Natl. Acad. Sci. USA, 1989, 86, 6553-6556), cholic acid (Manoharan et al., Bioorg. Med. Chem. Lett., 1994, 4, 1053-1060), a thioether, e.g., hexyl-S-tritylthiol (Manoharan et al., Ann. NY. Acad. Sci., 1992, 660, 306-309; Manoharan et al., Bioorg. Med. Chem. Lett., 1993, 3, 2765-2770), a thiocholesterol (Oberhauser et al., Nucl. Acids Res., 1992, 20, 533-538), an aliphatic chain, e.g., do-decan-diol or undecyl residues (Saison-Behmoaras et al., EMBO J, 1991, 10, 1111-1118; Kabanov et al., FEBS Lett., 1990, 259, 327-330; Svinarchuk et al., Biochimie, 1993, 75, 49-54), a phospholipid, e.g., di-hexadecyl-rac-glycerol or triethyl-ammonium 1,2-di-0-hexadecyl-rac-glycero-3-H-phosphonate (Manoharan et al., Tetrahedron Lett., 1995, 36, 3651-3654; Shea et al., Nucl. Acids Res., 1990, 18, 3777-3783), a polyamine or a polyethylene glycol chain (Manoharan et al., Nucleosides & Nucleotides, 1995, 14, 969-973), or adamantane acetic acid a palmityl moiety (Mishra et al., Biochim. Biophys. Acta, 1995, 1264, 229-237), an octadecylamine or hexylamino-carbonyl-oxycholesterol moiety (Crooke et al., J. Pharmacol. Exp. Ther., 1996, 277, 923-937), a tocopherol group (Nishina et al., Molecular Therapy Nucleic Acids, 2015, 4, e220; and Nishina et al., Molecular Therapy, 2008, 16, 734-740), or a GalNAc cluster (e.g., WO20141/179620).

### Conjugate Moieties

[0439] Conjugate moieties include, without limitation, intercalators, reporter molecules, polyamines, polyamides, peptides, carbohydrates, vitamin moieties, polyethylene glycols, thioethers, polyethers, cholesterols, thiocholesterols, cholic acid moieties, folate, lipids, phospholipids, biotin, phenazine, phenanthridine, anthraquinone, adamantane, acridine, fluoresceins, rhodamines, coumarins, fluorophores, dyes, bile acids, and phenylbutyric acid. In particular embodiments, conjugate moieties are selected from a peptide, a lipid, N-acetylgalactosamine (GalNAc), cholesterol, vitamin E, lipoic acid, panthothenic acid, polyethylene glycol, an antibody (e.g., an antibody for crossing the blood brain barrier such as anti-transferrin receptor antibody), or a cell-penetrating peptide (e.g., transactivator of transcription (TAT) and penetratin).

[0440] In certain embodiments, a conjugate moiety comprises an active drug substance, for example, aspirin, warfarin, phenylbutazone, ibuprofen, suprofen, fenbufen, ketoprofen, (S)-(+)-pranoprofen, carprofen, dansylsarcosine, 2,3,5-triiodobenzoic acid, fingolimod, flufenamic acid, folinic acid, a benzothiadiazide, chlorothiazide, a diazepine, indomethacin, a barbiturate, a cephalosporin, a sulfa drug, an antidiabetic, an antibacterial or an antibiotic.

### Conjugate Linkers

[0441] Conjugate moieties are attached to a UNC13A AON through conjugate linkers. In certain oligomeric compounds, the conjugate linker is a single chemical bond (i.e., the conjugate moiety is attached directly to an oligonucleotide through a single bond). In certain embodiments, the conjugate linker comprises a chain structure, such as a hydrocarbon chain, or an oligomer of repeating units such as ethylene glycol, nucleosides, or amino acid units.

[0442] In certain embodiments, a conjugate linker comprises one or more groups selected from alkyl, amino, oxo, amide, disulfide, polyethylene glycol, ether, thioether, and hydroxylamino. In certain such embodiments, the conjugate linker comprises groups selected from alkyl, amino, oxo, amide and ether groups. In certain embodiments, the conjugate linker comprises groups selected from alkyl and amide groups. In certain embodiments, the conjugate linker comprises groups selected from alkyl and ether groups. In certain embodiments, the conjugate linker comprises at least one phosphorus moiety. In certain embodiments, the conjugate linker comprises at least one phosphate group. In certain embodiments, the conjugate linker includes at least one neutral linking group.

[0443] In certain embodiments, conjugate linkers, including the conjugate linkers described above, are bifunctional linking moieties, e.g., those known in the art to be useful for attaching conjugate groups to parent compounds, such as the oligonucleotides provided herein. In general, a bifunctional linking moiety comprises at least two functional groups. One of the functional groups is selected to bind to a particular site on a parent compound and the other is selected to bind to a conjugate group. Examples of functional groups used in a bifunctional linking moiety include but are not limited to electrophiles for reacting with nucleophilic groups and nucleophiles for reacting with electrophilic groups. In certain embodiments, bifunctional linking moieties comprise one or more groups selected from amino, hydroxyl, carboxylic acid, thiol, alkyl, alkenyl, and alkynyl.

[0444] Examples of conjugate linkers include but are not limited to pyrrolidine, 8-amino-3,6-dioxaoctanoic acid (ADO), succinimidyl 4-(N-maleimidomethyl)cyclohexane-1-carboxylate (SMCC) and 6-aminohexanoic acid (AHEX or AHA). Other conjugate linkers include but are not limited to substituted or unsubstituted C₁-C₁₀ alkyl, substituted or unsubstituted C₂-C₁₀ alkenyl or substituted or unsubstituted C₂-C₁₀ alkynyl, wherein a nonlimiting list of preferred substituent groups includes hydroxyl, amino, alkoxy, carboxy, benzyl, phenyl, nitro, thiol, thioalkoxy, halogen, alkyl, aryl, alkenyl and alkynyl.

[0445] In certain embodiments, conjugate linkers comprise 1-10 linker-nucleosides. In certain embodiments, conjugate linkers comprise 2-5 linker-nucleosides. In certain embodiments, conjugate linkers comprise 3 linker-nucleosides.

[0446] In certain embodiments, such linker-nucleosides are modified nucleosides. In certain embodiments such linker-nucleosides comprise a modified sugar moiety. In certain embodiments, linker-nucleosides are unmodified. In certain embodiments, linker-nucleosides comprise an optionally protected heterocyclic base selected from a purine, substituted purine, pyrimidine or substituted pyrimidine. In certain embodiments, a cleavable moiety is a nucleoside selected from uracil, thymine, cytosine, 4-N-benzoylcytosine, 5-methyl cytosine, 4-N-benzoyl-5-methyl cytosine, adenine, 6-N-benzoyladenine, guanine and 2-N-isobutyrylguanine. It is typically desirable for linker-nucleosides to be cleaved from the oligomeric compound after it reaches a target tissue. Accordingly, linker-nucleosides are typically linked to one another and to the remainder of the oligomeric compound through cleavable bonds. In certain embodiments, such cleavable bonds are phosphodiester bonds.

[0447] Herein, linker-nucleosides are not considered to be part of the oligonucleotide. Accordingly, in embodiments in which an oligomeric compound comprises an oligonucleotide consisting of a specified number or range of linked nucleosides and/or a specified percent complementarity to a reference nucleic acid and the oligomeric compound also comprises a conjugate group comprising a conjugate linker comprising linker-nucleosides, those linker-nucleosides are not counted toward the length of the oligonucleotide and are not used in determining the percent complementarity of the oligonucleotide for the reference nucleic acid.

[0448] In certain embodiments, it is desirable for a conjugate group to be cleaved from the UNC13A AON. For example, in certain circumstances oligomeric compounds comprising a particular conjugate moiety are better taken up by a particular cell type, but once the oligomeric compound has been taken up, it is desirable that the conjugate group be cleaved to release the unconjugated or parent oligonucleotide. Thus, certain conjugate linkers may comprise one or more cleavable moieties. In certain embodiments, a cleavable moiety is a cleavable bond. In certain embodiments, a cleavable moiety is a group of atoms comprising at least one cleavable bond. In certain embodiments, a cleavable moiety comprises a group of atoms having one, two, three, four, or more than four cleavable bonds. In certain embodiments, a cleavable moiety is selectively cleaved inside a cell or subcellular compartment, such as a lysosome. In certain embodiments, a cleavable moiety is selectively cleaved by endogenous enzymes, such as nucleases.

[0449] In certain embodiments, a cleavable bond is selected from among: an amide, an ester, an ether, one or both esters of a phosphodiester, a phosphate ester, a carbamate, or a disulfide. In certain embodiments, a cleavable bond is one or both of the esters of a phosphodiester. In certain embodiments, a cleavable moiety comprises a phosphate or phosphodiester. In certain embodiments, the cleavable moiety is a phosphate linkage between an oligonucleotide and a conjugate moiety or conjugate group.

[0450] In certain embodiments, a cleavable moiety comprises or consists of one or more linker-nucleosides. In certain such embodiments, the one or more linker-nucleosides are linked to one another and/or to the remainder of the oligomeric compound through cleavable bonds. In certain embodiments, such cleavable bonds are unmodified phosphodiester bonds. In certain embodiments, a cleavable moiety is 2′-deoxy nucleoside that is attached to either the 3′ or 5′-terminal nucleoside of an oligonucleotide by a phosphate internucleoside linkage and covalently attached to the remainder of the conjugate linker or conjugate moiety by a phosphate or phosphorothioate linkage. In certain such embodiments, the cleavable moiety is 2′-deoxy adenosine.

### Terminal Groups

[0451] In certain embodiments, oligomeric compounds comprise one or more terminal groups. In certain such embodiments, oligomeric compounds comprise a stabilized 5′-phosphate. Stabilized 5′-phosphates include, but are not limited to 5′-phosphonates, including, but not limited to 5′-vinylphosphonates. In certain embodiments, terminal groups comprise one or more abasic nucleosides and/or inverted nucleosides. In certain embodiments, terminal groups comprise one or more 2′-linked nucleosides. In certain such embodiments, the 2′-linked nucleoside is an abasic nucleoside. In various embodiments, terminal groups comprise one or more spacers.

### Diagnostic Methods

[0452] The disclosure also provides a method of diagnosing a patient with a neurological disease that relies upon detecting levels of UNC13A expression signal in one or more biological samples of a patient. As used herein, the term “UNC13A expression signal” can refer to any indication of UNC13A gene expression, or gene or gene product activity. UNC13A gene products include RNA (e.g., mRNA), peptides, and proteins. Indices of UNC13A gene expression that can be assessed include, but are not limited to, UNC13A gene or chromatin state, UNC13A gene interaction with cellular components that regulate gene expression, UNC13A gene product expression levels (e.g., expression levels of UNC13A transcripts (for example, a UNC13A pre-mRNA) comprising a sequence that shares at least 90% (e.g., 90%, 91%, 92%, 93%, 94%, 95%, 96%, 97%, 98%, 99%, or 100%) identity to any one of SEQ ID NO: 5057-5065 or SEQ ID NOs: 5206-5208, or interaction of UNC13A RNA or protein with transcriptional, translational, or post-translational processing machinery.

[0453] Detection of UNC13A expression signal may be accomplished through in vivo, in vitro, or ex vivo methods. In a preferred embodiment, methods of the disclosure may be carried out in vitro. Methods of detecting may involve detection in blood, serum, fecal matter, tissue, cerebrospinal fluid, spinal fluid, urine, extracellular vesicles (for example, CSF exosomes), or cells of a patient. Detection may be achieved by measuring expression signal of UNC13A transcripts (for example, a UNC13A pre-mRNA) comprising a sequence that shares at least 90% (e.g., 90%, 91%, 92%, 93%, 94%, 95%, 96%, 97%, 98%, 99%, or 100%) identity to SEQ ID NO: 5057-5065 or SEQ ID NOs: 5206-5208 in whole tissue, tissue explants, cell cultures, dissociated cells, cell extract, extracellular vesicles (for example, CSF exosomes), or body fluids, including blood, spinal fluid, cerebrospinal fluid, urine, lymphatic fluid, plasma, or serum. Methods of detection include assays that measure levels of UNC13A gene product expression such as Western blotting, FACS, ELISA, other quantitative binding assays, cell or tissue growth assays, Northern blots, quantitative or semi-quantitative polymerase chain reaction, medical imaging methods (e.g., MRI), or immunostaining methods (e.g., immunohistochemistry or immunocytochemistry).

### Modifications in General

[0454] While certain compounds, compositions and methods described herein have been described with specificity in accordance with certain embodiments, the following examples serve only to illustrate the compounds described herein and are not intended to limit the same. Each of the references, GenBank accession numbers, and the like recited in the present application is incorporated herein by reference in its entirety.

[0455] Although the sequence listing accompanying this filing identifies each sequence as either “RNA” or “DNA” as required, in reality, those sequences may be modified with any combination of chemical modifications. One of skill in the art will readily appreciate that such designation as “RNA” or “DNA” to describe modified oligonucleotides is, in certain instances, arbitrary. For example, an oligonucleotide comprising a nucleoside comprising a 2′-OH sugar moiety and a thymine base could be described as a DNA having a modified sugar (2′-OH in place of one 2′-H of DNA) or as an RNA having a modified base (thymine(methylated uracil) in place of a uracil of RNA). Accordingly, nucleic acid sequences provided herein, including, but not limited to those in the sequence listing, are intended to encompass nucleic acids containing any combination of natural or modified RNA and/or DNA, including, but not limited to such nucleic acids having modified nucleobases. By way of further example and without limitation, an oligomeric compound having the nucleobase sequence “ATCGATCG” encompasses any oligomeric compounds having such nucleobase sequence, whether modified or unmodified, including, but not limited to, such compounds comprising RNA bases, such as those having sequence “AUCGAUCG” and those having some DNA bases and some RNA bases such as “AUCGATCG” and oligomeric compounds having other modified nucleobases, such as “AT^{m}CGAUCG,” wherein ^{m}C indicates a cytosine base comprising a methyl group at the 5-position.

[0456] Certain compounds described herein (e.g., modified oligonucleotides) have one or more asymmetric center and thus give rise to enantiomers, diastereomers, and other stereoisomeric configurations that may be defined, in terms of absolute stereochemistry, as (R) or (S), as a or R such as for sugar anomers, or as (D) or (L), such as for amino acids, etc. Compounds provided herein that are drawn or described as having certain stereoisomeric configurations include only the indicated compounds. Compounds provided herein that contain stereocenters that are drawn or described with undefined stereochemistry included all such possible isomers, including their stereorandom and optically pure forms, unless specified otherwise. Likewise, all tautomeric forms of the compounds herein are also included unless otherwise indicated. Unless otherwise indicated, compounds described herein are intended to include corresponding salt forms.

[0457] The compounds described herein include variations in which one or more atoms are replaced with a non-radioactive isotope or radioactive isotope of the indicated element. For example, compounds herein that comprise hydrogen atoms encompass all possible deuterium substitutions for each of the ¹H hydrogen atoms. Isotopic substitutions encompassed by the compounds herein include but are not limited to: ²H or ³H in place of ¹H, ¹³C or ¹⁴C in place of ¹²C, ¹⁵N in place of ¹⁴N, 170 or 180 in place of 160, and ³³S, ³⁴S, ³⁵S, or ³⁶S in place of 32S. In certain embodiments, non-radioactive isotopic substitutions may impart new properties on the oligomeric compound that are beneficial for use as a therapeutic or research tool.

### EXAMPLES

[0458] The disclosure is further illustrated by the following examples. The examples are provided for illustrative purposes only, and are not to be construed as limiting the scope or content of the disclosure in any way.

### Example 1: Design and Selection of UNC13A Oligonucleotides

[0459] UNC13A AONs oligonucleotides that target a UNC13A transcript are designed and tested to identify UNC13A AONs capable of reducing quantity of UNC13A transcripts (e.g., mis-spliced UNC13A transcripts). Such UNC13A AONs include UNC13A parent oligonucleotides represented by any of SEQ ID NOs: 1-1264 or UNC13A oligonucleotide variants represented by SEQ ID NOs: 2529-3792. The UNC13A parent oligonucleotides are 25 nucleosides in length. Each of the nucleosides of the UNC13A parent oligonucleotides are modified nucleosides with 2′MOE sugar moieties, and each “C” is replaced with a 5-MeC. Additionally, each of the internucleoside linkages between the nucleosides of the UNC13A oligonucleotides are phosphorothioate internucleoside linkages.

[0460] Generally, the length of the UNC13A antisense oligonucleotides are 25 oligonucleotide units in length. However, variants of the UNC13A antisense oligonucleotides were also designed with varying lengths (e.g., 23mers, 21mers, or 19mers). Examples of these variant UNC13A antisense oligonucleotides were designed to include a subset of the sequences of SEQ ID NOs: 2529-3792.

TABLE 6A
Example UNC13A AONs (including UNC13A
oligonucleotides with two spacers)

| | Oligonucleotide Sequence | |
|---|---|---|
| SEQ | (where S indicates | |
| ID | presence of a Spacer)* | |
| No: | (5′ → 3′) | Length |
| 5133 | GGGCAGSCAGGAATGGTGSGTGGAA | 25 |
| 5134 | AGGGAGSAGTTTTCCAGGSAAAGGG | 25 |
| 5135 | GCAGCTSGAAGAGACATASCCAGAC | 25 |
| 5136 | TCCACCSGCCACTCACAASCATCCA | 25 |
| 5137 | GAAAGTSTCATGGAGAGTSCAAGGG | 25 |
| 5138 | GGGCAGGCSGGAATGGTGSGTGGAA | 25 |
| 5139 | AGGGAGGASTTTTCCAGGSAAAGGG | 25 |
| 5140 | GCAGCTGGSAGAGACATASCCAGAC | 25 |
| 5141 | TCCACCAGSCACTCACAASCATCCA | 25 |
| 5142 | GAAAGTGTSATGGAGAGTSCAAGGG | 25 |
| 5143 | GCAGGCASGAATGGTSAGTGGAA | 23 |
| 5144 | GGGCAGGSAGGAATGSTGAGTGG | 23 |
| 5145 | GGCAGGCSGGAATGGSGAGTGGA | 23 |
| 5146 | GTAAAGGSAATGGCASGGCGGGC | 23 |
| 5147 | AGGTAAASGGAATGGSATGGCGG | 23 |
| 5148 | GGTAAAGSGAATGGCSTGGCGGG | 23 |
| 5149 | AGGAGGTSACCCTGASTCTGGAC | 23 |
| 5150 | AGAGGAGSTGACCCTSAATCTGG | 23 |
| 5151 | GAGGAGGSGACCCTGSATCTGGA | 23 |
| 5152 | ACAAACGSCCCAATCSTGAGTGG | 23 |
| 5153 | ACACAAASGGCCCAASCCTGAGT | 23 |
| 5154 | CACAAACSGCCCAATSCTGAGTG | 23 |
| 5155 | TCTTTCCSGGAAACCSAGGCAGC | 23 |
| 5156 | GTTCTTTSCAGGAAASCCAGGCA | 23 |
| 5157 | TTCTTTCSAGGAAACSCAGGCAG | 23 |
| 5158 | TCCGCAASTTAATCCSCCTACCC | 23 |
| 5159 | GATCCGCSACTTAATSCACCTAC | 23 |
| 5160 | ATCCGCASCTTAATCSACCTACC | 23 |
| 5161 | CCCACCCSTCTAACTSCCCCAAA | 23 |
| 5162 | CACCCACSCATCTAASTACCCCA | 23 |
| 5163 | ACCCACCSATCTAACSACCCCAA | 23 |
| 5164 | AAGTGTCSTGGAGAGSGCAAGGG | 23 |
| 5165 | GAAAGTGSCATGGAGSGTGCAAG | 23 |
| 5166 | AAAGTGTSATGGAGASTGCAAGG | 23 |

* Unless otherwise noted, each of the nucleosides of antisense oligonucleotides shown are modified nucleosides with 2′-O-(2-methoxyethyl) (2′-MOE) sugar moieties, each “C” is replaced with a 5-methylcytosine (5-MeC), and all internucleoside linkages are phosphorothioate linkages. A spacer as indicated by S is not a nucleoside. S represents a spacer of Formula (Iia′) as disclosed herein.

TABLE 6B
Example UNC13A AONs (including UNC13A
oligonucleotides with two spacers)

| | Oligonucleotide Sequence | |
|---|---|---|
| SEQ | (where S indicates | |
| ID | presence of a Spacer)* | |
| No: | (5′ → 3′) | Length |
| 5168 | AGTTCASCCACACATCCTSCCATTC | 25 |
| 5169 | AGTTCAACSACACATCCTSCCATTC | 25 |
| 5170 | GTTCAACSACACATCSTTCCATT | 23 |
| 5171 | AGTTCAASCACACATSCTTCCAT | 23 |
| 5172 | TTCAACCSCACATCCSTCCATTC | 23 |
| 5173 | CTTGCASTAGTTCAACCASACATCC | 25 |
| 5174 | CTTGCAATSGTTCAACCASACATCC | 25 |
| 5175 | TTGCAATSGTTCAACSACACATC | 23 |
| 5176 | CTTGCAASAGTTCAASCACACAT | 23 |
| 5177 | TGCAATASTTCAACCSCACATCC | 23 |
| 5178 | ACACATSCATCCATCCATSCATTCA | 25 |
| 5179 | ACACATCCSTCCATCCATSCATTCA | 25 |
| 5180 | CACATCCSTCCATCCSTCCATTC | 23 |
| 5181 | ACACATCSATCCATCSATCCATT | 23 |
| 5182 | ACATCCASCCATCCASCCATTCA | 23 |
| 5183 | CAGTAASTCAACCACACASCCATCC | 25 |
| 5184 | CAGTAATTSAACCACACASCCATCC | 25 |
| 5185 | AGTAATTSAACCACASATCCATC | 23 |
| 5186 | CAGTAATSCAACCACSCATCCAT | 23 |
| 5187 | GTAATTCSACCACACSTCCATCC | 23 |
| 5188 | ACCTTTSAGTAATTCAACSACACAT | 25 |
| 5189 | ACCTTTCASTAATTCAACSACACAT | 25 |
| 5190 | CCTTTCASTAATTCASCCACACA | 23 |
| 5191 | ACCTTTCSGTAATTCSACCACAC | 23 |
| 5192 | CTTTCAGSAATTCAASCACACAT | 23 |
| 5193 | CTCTTTSATCCATCCACASACCCAC | 25 |
| 5194 | CTCTTTTASCCATCCACASACCCAC | 25 |
| 5195 | TCTTTTASCCATCCASACACCCA | 23 |
| 5196 | CTCTTTTSTCCATCCSCACACCC | 23 |
| 5197 | CTTTTATSCATCCACSCACCCAC | 23 |
| 5198 | ATCTACSCTTTTATCCATSCACACA | 25 |
| 5199 | ATCTACTCSTTTATCCATSCACACA | 25 |
| 5200 | TCTACTCSTTTATCCSTCCACAC | 23 |
| 5201 | ATCTACTSTTTTATCSATCCACA | 23 |
| 5202 | CTACTCTSTTATCCASCCACACA | 23 |

* Unless otherwise noted, each of the nucleosides of antisense oligonucleotides shown are modified nucleosides with 2′-O-(2-methoxyethyl) (2′-MOE) sugar moieties, each “C” is replaced with a 5-methylcytosine (5-MeC), and all internucleoside linkages are phosphorothioate linkages. A spacer as indicated by S is not a nucleoside. S represents a spacer of Formula (Iia′) as disclosed herein.

### Example 2: Methods for Evaluating UNC13A Antisense Oligonucleotides

[0461] UNC13A antisense oligonucleotides were evaluated in iPSC derived human motor neurons (hMN). The cells were seeded in 96-well plates at a density of 50,000 cells/well. Antisense oligonucleotide (AON) to TDP43 was transfected with Endoporter (Gene Tools, Philomath, OR, USA) to decrease expression of the full length UNC13a transcript. Vehicle control consisted of motor neuron treatment with Endoporter alone. Positive controls included cells that were treated with TDP43 AON alone (“AON TDP43” or “TDP43 AON”).

[0462] TDP43 AON is a gapmer oligonucleotide and has the following sequence and chemistry: 5′ A*A*G*G*C*T*T*C*A*T*A*T*T*G*T*A*C*T*T*T 3′ (SEQ ID NO: 5167) where *=phosphorothioate, underlined=DNA, other=2′MOE RNA; each “C” is 5-MeC.

[0463] To evaluate UNC13a AON ability to restore full length UNC13A (UNC13A FL) mRNA (also referred to as correctly spliced UNC13A (UNC13A CS) mRNA), antisense oligonucleotides to UNC13A were co-incubated with TDP43 AON in Endoporter in media before addition to the cells. After 72 hours, antisense oligonucleotides and Endoporter were washed out and replaced with fresh media alone. After 72 additional hours, RNA was collected from the 96-well plates for RT-qPCR. RNA was isolated, cDNA generated and multiplexed RT-qPCR assay performed with Taqman probes for UNC13A full length transcript and reference GAPDH quantification.

[0464] Transcript levels (e.g., UNC13A full length transcript or TDP43 transcript) were detected by RT-qPCR using Taqman. Specifically, RT-qPCR was performed for detecting GAPDH using Thermofisher® TaqMan Gene Expression Assay Hs03929097_g1. RT-qPCR was performed for detecting UNC13A-FL transcripts using Thermofisher® TaqMan Gene Expression Assay Hs00392638_ml.

[0465] RT-qPCR was performed on Applied Biosystems® 7500 Real-time PCR systems. One cycle of reverse transcription was performed at a temperature of 50° C. for 5 min. One cycle of RT inactivation/initial denaturation was performed at a temperature of 95° C. for 20 seconds. Forty five cycles of amplification were performed at a temperature of 95° C. for 1 second followed by 60° C. for 20 seconds.

[0466] UNC13A-FL (Ct) was normalized to GAPDH (deltaCt). To visualize the quantitative changes (e.g., % decrease of UNC13A-FL), the normalized UNC13A-FL signal was further normalized to the vehicle (treated with Endoporter alone, deltadeltaCt). Relative quantity (RQ) of transcript level was calculated using the equation RQ=2^{-deltadeltaCt} and is used to describe the treatment condition comparison to normal, healthy levels (1.0). RQ values for UNC13A FL were normalized using the following formula:

$$( ( ( RQAON - RQTDP 43 ) / ( R Qendo - RQTDP 43 ) ) * 100$$

[0467] Table 7 shows the RT-qPCR results of UNC13A AONs with spacers and performance of UNC13A AONs without spacers in human motor neurons. UNC13A AONs (e.g., UNC13A oligonucleotides without spacers or with one or two spacers were tested for their ability to increase or restore full-length UNC13A mRNA (i.e., mRNA from which full-length UNC13A protein is translated) levels. In some cases, UNC13A AONs with spacers increased full-length UNC13A mRNA (“UNC13A FL”), also referred to herein as correctly spliced UNC13A (UNC13A CS). In some cases, UNC13A AONs without spacers increased full-length UNC13A mRNA or correctly spliced UNC13A mRNA (UNC13A CS)). Specific AON sequences are labeled according to their corresponding SEQ ID NO.

[0468] As shown in Table 7, a 500 nM dose of SEQ ID NO: 5153 (ACACAAASGGCCCAASCCTGAGT with two spacers) rescued full length UNC13A mRNA to 55.69%. Comparatively, a 500 nM dose of SEQ ID NO: 2788 (ACACAAACGGCCCAATCCTGAGT with no spacers) rescued full length UNC13A mRNA to 41.87%. This indicates that the addition of spacers of SEQ ID NO: 5153 improves the performance in comparison to the UNC13A AON counterpart without spacers (e.g., SEQ ID NO: 2788).

[0469] Additionally shown in Table 7, a 200 nM dose of SEQ ID NO: 5159 (GATCCGCSACTTAATSCACCTAC with two spacers) rescued full length UNC13A mRNA to 55.88%. A 500 nM dose of SEQ ID NO: 5159 (GATCCGCSACTTAATSCACCTAC with two spacers) rescued full length UNC13A mRNA to 66.62%. Comparatively, a 200 nM dose of SEQ ID NO: 3547 (GATCCGCAACTTAATCCACCTAC with no spacers) rescued full length UNC13A mRNA to 43.88%. A 500 nM dose of SEQ ID NO: 3547 (GATCCGCAACTTAATCCACCTAC with no spacers) rescued full length UNC13A mRNA to 66.98%. This indicates that at 200 nM and 500 nM doses, the performance of an AON with SEQ ID NO: 5159 (with spacers) is similar to the performance of the UNC13A AON counterpart without spacers (e.g., SEQ ID NO: 3547).

[0470] Additionally shown in Table 7, a 200 nM dose of SEQ ID NO: 5162 (CACCCACSCATCTAASTACCCCA with two spacers) rescued full length UNC13A mRNA to 47.94%. A 500 nM dose of SEQ ID NO: 5162 (CACCCACSCATCTAASTACCCCA with two spacers) rescued full length UNC13A mRNA to 83.19%. Comparatively, a 200 nM dose of SEQ ID NO: 3652 (CACCCACCCATCTAACTACCCCA with no spacers) rescued full length UNC13A mRNA to 47.68%. A 500 nM dose of SEQ ID NO: 3652 (CACCCACCCATCTAACTACCCCA with no spacers) rescued full length UNC13A mRNA to 41.16%. This indicates that at a 200 nM dose, the performance of SEQ ID NO: 5162 (with spacers) is similar to the performance of the UNC13A AON counterpart without spacers (e.g., SEQ ID NO: 3652). However, at a 500 nM dose, the addition of spacers of SEQ ID NO: 5162 improves the performance in comparison to the UNC13A AON counterpart without spacers (e.g., SEQ ID NO: 3652).

[0471] Additionally shown in Table 7, a 500 nM dose of SEQ ID NO: 5161 (CCCACCCSTCTAACTSCCCCAAA with two spacers) rescued full length UNC13A mRNA to 43.10%. Comparatively, a 500 nM dose of SEQ ID NO: 3650 (CCCACCCATCTAACTACCCCAAA with no spacers) rescued full length UNC13A mRNA to 23.37%. This indicates that at a 500 nM dose, the addition of spacers improves the performance of an AON with SEQ ID NO: 5161 in comparison to the UNC13A AON counterpart without spacers (e.g., SEQ ID NO: 3650).

[0472] Additionally shown in Table 7, a 200 nM dose of SEQ ID NO: 5164 (AAGTGTCSTGGAGAGSGCAAGGG with two spacers) rescued full length UNC13A mRNA to 35.39%. A 500 nM dose of SEQ ID NO: 5164 (AAGTGTCSTGGAGAGSGCAAGGG with two spacers) rescued full length UNC13A mRNA to 6.60%. Comparatively, a 200 nM dose of SEQ ID NO: 3774 (AAGTGTCATGGAGAGTGCAAGGG with no spacers) rescued full length UNC13A mRNA to 19.04%. A 500 nM dose of SEQ ID NO: 3774 (AAGTGTCATGGAGAGTGCAAGGG with no spacers) rescued full length UNC13A mRNA to −34.58%. This indicates that at 200 nM and 500 nM doses, the addition of spacers improves the performance of an AON with SEQ ID NO: 5164 in comparison to the UNC13A AON counterpart without spacers (e.g., SEQ ID NO: 3774).

[0473] Additionally shown in Table 7, a 200 nM dose of SEQ ID NO: 5142 (GAAAGTGTSATGGAGAGTSCAAGGG with two spacers) rescued full length UNC13A mRNA to 67.77%. A 500 nM dose of SEQ ID NO: 5142 (GAAAGTGTSATGGAGAGTSCAAGGG with two spacers) rescued full length UNC13A mRNA to 84.79%. Comparatively, a 200 nM dose of SEQ ID NO: 1248 (GAAAGTGTCATGGAGAGTGCAAGGG with no spacers) rescued full length UNC13A mRNA to 22.48%. A 500 nM dose of SEQ ID NO: 1248 (GAAAGTGTCATGGAGAGTGCAAGGG with no spacers) rescued full length UNC13A mRNA to 24.84%. This indicates that at 200 nM and 500 nM doses, the addition of spacers improves the performance of an AON with SEQ ID NO: 5142 in comparison to the UNC13A AON counterpart without spacers (e.g., SEQ ID NO: 1248).

[0474] Altogether, these results demonstrate that different UNC13A AONs including two spacers are capable of increasing UNC13A-FL mRNA to levels that are comparable to or improved beyond their non-spacer counterparts.

TABLE 7
Performance of UNC13A AONs in UNC13A full length assay
(UNC13A oligonucleotides without spacers, or with one or two spacers).

| | Oligonucleotide | QPCR potency | | QPCR potency | |
|---|---|---|---|---|---|
| | Sequence* (where S | 200 nM | 200 nM | 500 nM | 500 nM |
| SEQ ID | indicates presence | Normalized | Normalized | Normalized | Normalized |
| NO: | of a Spacer) (5′ → 3′) | CS | CS SD | CS | CS SD |
| 42 | GAAGAGCTGGGCAGGCAGGAATGGT | 3.79367 | 0.480565 | −63.053 | 0.19433 |
| 66 | TGTGGATGGTGTGGCCAGAAAGAGG | 60.6986 | 0.724229 | −23.435 | 0.36397 |
| 77 | GGCCAGGAGAGTGTGGATGGTGTGG | 154.828 | 1.127288 | 434.631 | 2.32539 |
| 101 | ATGGCATGGCGGGCAGTCTCAGAGG | 37.1601 | 0.448286 | 12.6634 | 0.41631 |
| 108 | AAAGGGAATGGCATGGCGGGCAGTC | −26.139 | 0.13718 | 22.9464 | 0.49028 |
| 112 | AGGTAAAGGGAATGGCATGGCGGGC | −5.3242 | 0.383369 | −37.199 | 0.17903 |
| 2639 | GGTAAAGGGAATGGCATGGCGGG | −29.228 | 0.227001 | −33.566 | 0.20089 |
| 5148 | GGTAAAGSGAATGGCSTGGCGGG | −16.331 | 0.304608 | −29.739 | 0.22392 |
| 2640 | AGGTAAAGGGAATGGCATGGCGG | −13.385 | 0.322337 | −40.436 | 0.15956 |
| 5147 | AGGTAAASGGAATGGSATGGCGG | −13.664 | 0.320657 | −24.027 | 0.2583 |
| 2638 | GTAAAGGGAATGGCATGGCGGGC | −29.989 | 0.222419 | −26.677 | 0.24235 |
| 5146 | GTAAAGGSAATGGCASGGCGGGC | 25.771 | 0.557959 | −18.428 | 0.29199 |
| 115 | TCCAGGTAAAGGGAATGGCATGGCG | −7.8349 | 0.268854 | 40.2877 | 0.61503 |
| 127 | AGGGAGGAGTTTTCCAGGTAAAGGG | −32.255 | 0.392785 | −25.109 | 0.4256 |
| 5134 | AGGGAGSAGTTTTCCAGGSAAAGGG | 6.97605 | 0.572906 | −3.6889 | 0.52394 |
| 5139 | AGGGAGGASTTTTCCAGGSAAAGGG | −70.51 | 0.217148 | −78.696 | 0.17957 |
| 162 | AGAGGAGGTGACCCTGAATCTGGAC | 129.033 | 0.93262 | 110.34 | 1.0505 |
| 2689 | GAGGAGGTGACCCTGAATCTGGA | 169.855 | 1.024819 | 164.814 | 1.30762 |
| 5151 | GAGGAGGSGACCCTGSATCTGGA | −72.457 | 0.658323 | 138.629 | 1.28191 |
| 2690 | AGAGGAGGTGACCCTGAATCTGG | 171.498 | 1.135638 | 3.26987 | 0.54512 |
| 5150 | AGAGGAGSTGACCCTSAATCTGG | 7.49253 | 0.565048 | −57.946 | 0.25617 |
| 2688 | AGGAGGTGACCCTGAATCTGGAC | 44.7095 | 0.740715 | 125.001 | 1.1197 |
| 5149 | AGGAGGTSACCCTGASTCTGGAC | −44.26 | 0.320771 | 12.8179 | 0.59018 |
| 195 | GAGAGTCAACCTGGAGGCCAAGGTG | 32.5688 | 0.559505 | 57.0338 | 0.7355 |
| 200 | GTAGTGAGAGTCAACCTGGAGGCCA | 70.681 | 0.905428 | 67.6819 | 0.88671 |
| 203 | TGAGTAGTGAGAGTCAACCTGGAGG | 91.2119 | 1.033573 | 59.7857 | 0.83742 |
| 244 | CCTGAGTGGTTAGGGCTGGAATAGA | 46.7792 | 0.756244 | −24.332 | 0.3124 |
| 248 | CAATCCTGAGTGGTTAGGGCTGGAA | −8.5 | 0.411217 | 73.8646 | 0.9253 |
| 254 | ACGGCCCAATCCTGAGTGGTTAGGG | 66.8521 | 0.88153 | 45.3726 | 0.74746 |
| 260 | ACACAAACGGCCCAATCCTGAGTGG | −11.42 | 0.462541 | 75.8487 | 0.8839 |
| 2787 | CACAAACGGCCCAATCCTGAGTG | −11.128 | 0.463949 | −41.939 | 0.31518 |
| 5154 | CACAAACSGCCCAATSCTGAGTG | 50.7872 | 0.762897 | −14.314 | 0.44857 |
| 2788 | ACACAAACGGCCCAATCCTGAGT | −27.43 | 0.385239 | 41.8694 | 0.71984 |
| 5153 | ACACAAASGGCCCAASCCTGAGT | −14.732 | 0.44655 | 55.6902 | 0.78657 |
| 2786 | ACAAACGGCCCAATCCTGAGTGG | −49.751 | 0.277462 | −20.306 | 0.41964 |
| 5152 | ACAAACGSCCCAATCSTGAGTGG | 105.349 | 1.026341 | 47.8744 | 0.74883 |
| 263 | CAGACACAAACGGCCCAATCCTGAG | −40.7843 | 0.3272 | −5.4793 | 0.5486 |
| 269 | CATACCCAGACACAAACGGCCCAAT | −21.2475 | 0.3317 | 14.4015 | 0.5542 |
| 273 | GAGACATACCCAGACACAAACGGCC | 47.2141 | 0.7590 | 116.3656 | 1.1906 |
| 283 | GCAGCTGGAAGAGACATACCCAGAC | 4.7146 | 0.5625 | −66.6389 | 0.2349 |
| 5135 | GCAGCTSGAAGAGACATASCCAGAC | 33.7840 | 0.6960 | −6.4957 | 0.5111 |
| 5140 | GCAGCTGGSAGAGACATASCCAGAC | 3.7461 | 0.5581 | 35.3538 | 0.7032 |
| 301 | TCTTTCCAGGAAACCCAGGCAGCTG | 17.5514 | 0.5395 | 30.5680 | 0.5952 |
| 303 | GTTCTTTCCAGGAAACCCAGGCAGC | 41.1141 | 0.5932 | −27.3254 | 0.2666 |
| 2830 | TTCTTTCCAGGAAACCCAGGCAG | −31.8396 | 0.2450 | −7.7732 | 0.3599 |
| 5157 | TTCTTTCSAGGAAACSCAGGCAG | −72.0800 | 0.0530 | −37.1813 | 0.2196 |
| 2831 | GTTCTTTCCAGGAAACCCAGGCA | −14.5643 | 0.3275 | 44.7209 | 0.6104 |
| 5156 | GTTCTTTSCAGGAAASCCAGGCA | −38.7597 | 0.2120 | −22.4863 | 0.2897 |
| 2829 | TCTTTCCAGGAAACCCAGGCAGC | 2.0002 | 0.4065 | −15.1244 | 0.3248 |
| 5155 | TCTTTCCSGGAAACCSAGGCAGC | −59.9899 | 0.1107 | −64.5153 | 0.0891 |
| 454 | CACGAATCTACCCACCAACTCATCC | −39.5824 | 0.2948 | −56.2924 | 0.2233 |
| 460 | TCTAGCCACGAATCTACCCACCAAC | 75.4170 | 0.7873 | −12.0685 | 0.4126 |
| 927 | GTCTGTCCACCAGCCACTCACAACC | 121.2337 | 0.9834 | −62.7895 | 0.1955 |
| 930 | TTCGTCTGTCCACCAGCCACTCACA | −18.2285 | 0.3863 | −45.7096 | 0.2686 |
| 937 | TCCATTTTTCGTCTGTCCACCAGCC | −63.8195 | 0.2479 | −54.2647 | 0.2917 |
| 1019 | GATCCGCAACTTAATCCACCTACCC | 88.0305 | 0.9091 | 44.9905 | 0.5436 |
| 3546 | ATCCGCAACTTAATCCACCTACC | 30.7027 | 0.4223 | 45.1113 | 0.5446 |
| 5160 | ATCCGCASCTTAATCSACCTACC | 38.8278 | 0.4913 | 50.8796 | 0.5936 |
| 3547 | GATCCGCAACTTAATCCACCTAC | 43.8789 | 0.5342 | 66.9823 | 0.7303 |
| 5159 | GATCCGCSACTTAATSCACCTAC | 55.8768 | 0.6360 | 66.6162 | 0.7272 |
| 3545 | TCCGCAACTTAATCCACCTACCC | 64.3790 | 0.7082 | 67.3066 | 0.7331 |
| 5158 | TCCGCAASTTAATCCSCCTACCC | 53.4236 | 0.6152 | 51.3988 | 0.5980 |
| 1124 | CACCCACCCATCTAACTACCCCAAA | 64.1844 | 0.6729 | 44.6783 | 0.4941 |
| 3651 | ACCCACCCATCTAACTACCCCAA | 41.2908 | 0.4631 | 64.1844 | 0.6729 |
| 5163 | ACCCACCSATCTAACSACCCCAA | 46.9810 | 0.4070 | 58.8250 | 0.6238 |
| 3652 | CACCCACCCATCTAACTACCCCA | 47.6810 | 0.5217 | 41.0564 | 0.4609 |
| 5162 | CACCCACSCATCTAASTACCCCA | 47.9432 | 0.5241 | 83.1895 | 0.8471 |
| 3650 | CCCACCCATCTAACTACCCCAAA | 72.0651 | 0.5775 | 23.3677 | 0.2988 |
| 5161 | CCCACCCSTCTAACTSCCCCAAA | 41.8445 | 0.4682 | 43.0965 | 0.4796 |
| 1248 | GAAAGTGTCATGGAGAGTGCAAGGG | 22.4754 | 0.5041 | 24.8358 | 0.5167 |
| 3775 | AAAGTGTCATGGAGAGTGCAAGG | 82.5919 | 0.8245 | 7.0300 | 0.4218 |
| 5166 | AAAGTGTSATGGAGASTGCAAGG | 61.0070 | 0.7095 | −4.8799 | 0.3583 |
| 3776 | GAAAGTGTCATGGAGAGTGCAAG | 55.7844 | 0.6816 | −19.7864 | 0.2789 |
| 5165 | GAAAGTGSCATGGAGSGTGCAAG | 40.0402 | 0.5977 | 3.6974 | 0.4040 |
| 3774 | AAGTGTCATGGAGAGTGCAAGGG | 19.0435 | 0.4858 | −34.5807 | 0.2001 |
| 5164 | AAGTGTCSTGGAGAGSGCAAGGG | 35.3880 | 0.5729 | 6.6020 | 0.4195 |
| 5137 | GAAAGTSTCATGGAGAGTSCAAGGG | −10.6183 | 0.3278 | 50.6900 | 0.6545 |
| 5142 | GAAAGTGTSATGGAGAGTSCAAGGG | 67.7691 | 0.7455 | 84.7852 | 0.8362 |
| 1260 | CACCATGGGAGAGAAAGTGTCATGG | 17.7544 | 0.4529 | 64.3335 | 0.7880 |

*Unless otherwise noted, each of the nucleosides of antisense oligonucleotides shown are modified nucleosides with 2′-O-(2-methoxyethyl) (2′-MO sugar moieties, each “C” is replaced with a 5-methylcytosine (5-MeC), and all internucleoside linkages are phosphorothioate linkages.
A spacer as indicated by S is not a nucleoside. S represents a spacer of Formula (Iia′) as disclosed herein.

### Example 3: Methods for Evaluating UNC13A Antisense Oligonucleotides

[0475] UNC13A antisense oligonucleotides were evaluated in iPSC derived human motor neurons (hMN). The cells were seeded in 96-well plates at a density of 40,000 cells/well. Antisense oligonucleotide (AON) to TDP43 was transfected with Endoporter (Gene Tools, Philomath, OR, USA) to decrease expression of the full length UNC13A transcript and increase expression of UNC13A cryptic exon. Vehicle control consisted of motor neuron treatment with Endoporter alone. Positive controls included cells that were treated with TDP43 AON alone (“AON TDP43” or “TDP43 AON”).

[0476] TDP43 AON is a gapmer oligonucleotide and has the following sequence and chemistry: 5′ A*A*G*G*C*T*T*C*A*T*A*T*T*G*T*A*C*T*T*T 3′ (SEQ ID NO: 5167) where *=phosphorothioate, underlined=DNA, other=2′MOE RNA; each “C” is 5-MeC.

[0477] To evaluate UNC13A AON ability to reduce UNC13A cryptic exon levels, antisense oligonucleotides to UNC13A were co-incubated with TDP43 AON in Endoporter in media before addition to the cells. After 72 hours, antisense oligonucleotides and Endoporter were washed out and replaced with fresh media alone. After six additional days, RNA was collected from the 96-well plates for RT-qPCR. RNA was isolated, cDNA generated and multiplexed RT-qPCR assay performed with Taqman probes for UNC13A cryptic exon, and reference GAPDH quantification.

[0478] Transcript levels (e.g., UNC13A cryptic exon, and TDP43 transcript) were detected by RT-qPCR using Taqman. Specifically, RT-qPCR was performed for detecting GAPDH using Thermofisher® TaqMan Gene Expression Assay Hs03929097_g1. UNC13a cryptic exon was detect using custom sequences.

### UNC13a Cryptic Exon:

Forward Primer:
(SEQ ID NO: 5203)
ATTGTTCTGCACGTCGGT
Reverse Primer:
(SEQ ID NO: 5204)
GTCTGGGTATGTCTCTTCCAG
Probe Sequence:
(SEQ ID NO: 5203)
AGTTCTTTCCAGGAAACCCAGGCA

[0479] RT-qPCR was performed on Applied Biosystems® 7500 Real-time PCR systems. One cycle of reverse transcription was performed at a temperature of 50° C. for 5 min. One cycle of RT inactivation/initial denaturation was performed at a temperature of 95° C. for 20 seconds. Forty five cycles of amplification were performed at a temperature of 95° C. for 1 second followed by 60° C. for 20 seconds.

[0480] UNC13A-cryptic (Ct) was normalized to GAPDH (deltaCt). To visualize the quantitative changes (e.g., % decrease of UNC13A-cryptic), the normalized UNC13A-cryptic signal was further normalized to the vehicle (treated with Endoporter alone, deltadeltaCt). Relative quantity (RQ) of transcript level was calculated using the equation RQ=2^{-deltadeltaCt} and is used to describe the treatment condition comparison to normal, healthy levels (1.0). RQ values for UNC13A cryptic were normalized using the following formula:

(((RQAON−RQendo)/(RQTDP43−RQendo))*100

[0481] Table 8 shows the RT-qPCR results of UNC13A AONs with spacers and performance of UNC13A AONs without spacers in human motor neurons.

[0482] As shown in Table 8, UNC13A AONs (e.g., UNC13A oligonucleotides without spacers or with one or two spacers) were tested for their ability to reduce UNC13A transcripts with a cryptic exon. In some cases, UNC13A AONs with spacers reduced UNC13A cryptic exon levels. In some cases, UNC13A AONs without spacers reduced UNC13A cryptic exon levels. Specific AON sequences are labeled according to their corresponding SEQ ID NO.

[0483] As shown in Table 8, a 200 nM dose of SEQ ID NO: 273 (GAGACATACCCAGACACAAACGGCC with no spacers) reduced UNC13A cryptic exon levels to 4.4%. A 50 nM dose of SEQ ID NO: 273 (GAGACATACCCAGACACAAACGGCC with no spacers) reduced UNC13A cryptic exon levels to 20.3%.

[0484] As shown in Table 8, a 200 nM dose of SEQ ID NO: 2831 (GTTCTTTCCAGGAAACCCAGGCA with no spacers) reduced UNC13A cryptic exon levels to 5.1%. A 50 nM dose of SEQ ID NO: 2831 (GTTCTTTCCAGGAAACCCAGGCA with no spacers) reduced UNC13A cryptic exon levels to 26.0%.

[0485] As shown in Table 8, a 200 nM dose of SEQ ID NO: 5156 (GTTCTTTSCAGGAAASCCAGGCA with two spacers) reduced UNC13A cryptic exon levels to 6.6%. A 50 nM dose of SEQ ID NO: 5156 (GTTCTTTSCAGGAAASCCAGGCA with two spacers) reduced UNC13A cryptic exon levels to 41.2%.

[0486] As shown in Table 8, a 200 nM dose of SEQ ID NO: 5140 (GCAGCTGGSAGAGACATASCCAGAC with two spacers) reduced UNC13A cryptic exon levels to 8.3%. A 50 nM dose of SEQ ID NO: 5140 (GCAGCTGGSAGAGACATASCCAGAC with two spacers) reduced UNC13A cryptic exon levels to 31.0%.

[0487] As shown in Table 8, a 200 nM dose of SEQ ID NO: 303 (GTTCTTTCCAGGAAACCCAGGCAGC with no spacers) reduced UNC13A cryptic exon levels to 8.8%. A 50 nM dose of SEQ ID NO: 303 (GTTCTTTCCAGGAAACCCAGGCAGC with no spacers) reduced UNC13A cryptic exon levels to 35.4%.

[0488] As shown in Table 8, a 200 nM dose of SEQ ID NO: 5135 (GCAGCTSGAAGAGACATASCCAGAC with two spacers) reduced UNC13A cryptic exon levels to 11.8%. A 50 nM dose of SEQ ID NO: 5135 (GCAGCTSGAAGAGACATASCCAGAC with two spacers) reduced UNC13A cryptic exon levels to 30.6%.

[0489] As shown in Table 8, a 200 nM dose of SEQ ID NO: 283 (GCAGCTGGAAGAGACATACCCAGACwith no spacers) reduced UNC13A cryptic exon levels to 13.8%. A 50 nM dose of SEQ ID NO: 283 (GCAGCTGGAAGAGACATACCCAGACwith no spacers) reduced UNC13A cryptic exon levels to 66.0%.

[0490] As shown in Table 8, a 200 nM dose of SEQ ID NO: 2830 (TTCTTTCCAGGAAACCCAGGCAG with no spacers) reduced UNC13A cryptic exon levels to 15.2%. A 50 nM dose of SEQ ID NO: 2830 (TTCTTTCCAGGAAACCCAGGCAG with no spacers) reduced UNC13A cryptic exon levels to 34.4%.

[0491] As shown in Table 8, a 200 nM dose of SEQ ID NO: 3585 (ACATCCATCCATCCATCCATTCA with no spacers) reduced UNC13A cryptic exon levels to 15.8%. A 50 nM dose of SEQ ID NO: 3585 (ACATCCATCCATCCATCCATTCA with no spacers) reduced UNC13A cryptic exon levels to 45.4%.

[0492] As shown in Table 8, a 200 nM dose of SEQ ID NO: 5155 (TCTTTCCSGGAAACCSAGGCAGC with two spacers) reduced UNC13A cryptic exon levels to 18.2%. A 50 nM dose of SEQ ID NO: 5155 (TCTTTCCSGGAAACCSAGGCAGC with two spacers) reduced UNC13A cryptic exon levels to 41.9%.

[0493] As shown in Table 8, a 200 nM dose of SEQ ID NO: 5157 (TTCTTTCSAGGAAACSCAGGCAG with two spacers) reduced UNC13A cryptic exon levels to 20.1%. A 50 nM dose of SEQ ID NO: 5157 (TTCTTTCSAGGAAACSCAGGCAG with two spacers) reduced UNC13A cryptic exon levels to 42.8%.

[0494] As shown in Table 8, a 200 nM dose of SEQ ID NO: 1059 (ACACATCCATCCATCCATCCATTCA with no spacers) reduced UNC13A cryptic exon levels to 23.1%. A 50 nM dose of SEQ ID NO: 1059 (ACACATCCATCCATCCATCCATTCA with no spacers) reduced UNC13A cryptic exon levels to 50.2%.

[0495] As shown in Table 8, a 200 nM dose of SEQ ID NO: 2829 (TCTTTCCAGGAAACCCAGGCAGC with no spacers) reduced UNC13A cryptic exon levels to 25%. A 50 nM dose of SEQ ID NO: 2829 (TCTTTCCAGGAAACCCAGGCAGC with no spacers) reduced UNC13A cryptic exon levels to 40.6%.

[0496] As shown in Table 8, a 200 nM dose of SEQ ID NO: 269 (CATACCCAGACACAAACGGCCCAAT with no spacers) reduced UNC13A cryptic exon levels to 27.2%. A 50 nM dose of SEQ ID NO: 269 (CATACCCAGACACAAACGGCCCAAT with no spacers) reduced UNC13A cryptic exon levels to 43.4%.

[0497] As shown in Table 8, a 200 nM dose of SEQ ID NO: 1142 (CTCTTTTATCCATCCACACACCCAC with no spacers) reduced UNC13A cryptic exon levels to 34.4%. A 50 nM dose of SEQ ID NO: 1142 (CTCTTTTATCCATCCACACACCCAC with no spacers) reduced UNC13A cryptic exon levels to 64.3%.

[0498] As shown in Table 8, a 200 nM dose of SEQ ID NO: 3670 (CTCTTTTATCCATCCACACACCC with no spacers) reduced UNC13A cryptic exon levels to 40.5%. A 50 nM dose of SEQ ID NO: 3670 (CTCTTTTATCCATCCACACACCC with no spacers) reduced UNC13A cryptic exon levels to 82.2%.

[0499] As shown in Table 8, a 200 nM dose of SEQ ID NO: 301 (TCTTTCCAGGAAACCCAGGCAGCTG with no spacers) reduced UNC13A cryptic exon levels to 41.6%. A 50 nM dose of SEQ ID NO: 301 (TCTTTCCAGGAAACCCAGGCAGCTG with no spacers) reduced UNC13A cryptic exon levels to 54.2%.

[0500] As shown in Table 8, a 200 nM dose of SEQ ID NO: 5165 (GAAAGTGSCATGGAGSGTGCAAG with two spacers) reduced UNC13A cryptic exon levels to 42.0%. A 50 nM dose of SEQ ID NO: 5165 (GAAAGTGSCATGGAGSGTGCAAG with two spacers) reduced UNC13A cryptic exon levels to 54.0%.

[0501] As shown in Table 8, a 200 nM dose of SEQ ID NO: 5198 (ATCTACSCTTTTATCCATSCACACA with two spacers) reduced UNC13A cryptic exon levels to 44.5%. A 50 nM dose of SEQ ID NO: 5198 (ATCTACSCTTTTATCCATSCACACA with two spacers) reduced UNC13A cryptic exon levels to 45.5%.

[0502] As shown in Table 8, a 200 nM dose of SEQ ID NO: 1147 (ATCTACTCTTTTATCCATCCACACA with no spacers) reduced UNC13A cryptic exon levels to 46.4%. A 50 nM dose of SEQ ID NO: 1147 (ATCTACTCTTTTATCCATCCACACA with no spacers) reduced UNC13A cryptic exon levels to 69.7%.

[0503] As shown in Table 8, a 200 nM dose of SEQ ID NO: 3587 (ACACATCCATCCATCCATCCATT with no spacers) reduced UNC13A cryptic exon levels to 47.8%.

[0504] As shown in Table 8, a 200 nM dose of SEQ ID NO: 5202 (CTACTCTSTTATCCASCCACACA with two spacers) reduced UNC13A cryptic exon levels to 48.1%. A 50 nM dose of SEQ ID NO: 5202 (CTACTCTSTTATCCASCCACACA with two spacers) reduced UNC13A cryptic exon levels to 76.5%.

[0505] As shown in Table 8, a 200 nM dose of SEQ ID NO: 5199 (ATCTACTCSTTTATCCATSCACACA with two spacers) reduced UNC13A cryptic exon levels to 48.2%. A 50 nM dose of SEQ ID NO: 5199 (ATCTACTCSTTTATCCATSCACACA with two spacers) reduced UNC13A cryptic exon levels to 62.8%.

[0506] As shown in Table 8, a 200 nM dose of SEQ ID NO: 5192 (CTTTCAGSAATTCAASCACACAT with two spacers) reduced UNC13A cryptic exon levels to 49.6%. A 50 nM dose of SEQ ID NO: 5192 (CTTTCAGSAATTCAASCACACAT with two spacers) reduced UNC13A cryptic exon levels to 70.9%.

[0507] As shown in Table 8, a 200 nM dose of SEQ ID NO: 3774 (AAGTGTCATGGAGAGTGCAAGGG with no spacers) reduced UNC13A cryptic exon levels to 49.8%. A 50 nM dose of SEQ ID NO: 3774 (AAGTGTCATGGAGAGTGCAAGGG with no spacers) reduced UNC13A cryptic exon levels to 67.0%.

TABLE 8
Performance of Exemplary UNC13A AONs evaluated in human derived iPSC motor neurons

| | | QPCR potency | | QPCR potency | |
|---|---|---|---|---|---|
| | | 200 nM | 200 nM | 50 nM | 50 nM |
| | | Normali- | SD | Normali- | SD |
| | Oligonucleotide | zed | Normalized | zed | Normalized |
| | Sequence* (where S | UNC13A | UNC13A | UNC13A | UNC13A |
| SEQ ID | indicates presence | Cryptic | Cryptic | Cryptic | Cryptic |
| NO: | of a Spacer) (5′ → 3′) | Exon | Exon | Exon | Exon |
| 273 | GAGACATACCCAGACACAAACGGCC | 4.38 | 4.41 | 20.3 | 14.4 |
| 2831 | GTTCTTTCCAGGAAACCCAGGCA | 5.11 | 4.14 | 26 | 15.2 |
| 5156 | GTTCTTTSCAGGAAASCCAGGCA | 6.62 | 6.06 | 41.2 | 15.2 |
| 5140 | GCAGCTGGSAGAGACATASCCAGAC | 8.3 | 7.86 | 31 | 26.4 |
| 303 | GTTCTTTCCAGGAAACCCAGGCAGC | 8.84 | 7.85 | 35.4 | 22.4 |
| 5135 | GCAGCTSGAAGAGACATASCCAGAC | 11.8 | 10.7 | 30.6 | 13 |
| 283 | GCAGCTGGAAGAGACATACCCAGAC | 13.8 | 7.11 | 66 | 45.9 |
| 2830 | TTCTTTCCAGGAAACCCAGGCAG | 15.2 | 7.39 | 34.4 | 25.1 |
| 3585 | ACATCCATCCATCCATCCATTCA | 15.8 | 8.84 | 45.4 | 14 |
| 5155 | TCTTTCCSGGAAACCSAGGCAGC | 18.2 | 9.18 | 41.9 | 24.2 |
| 5157 | TTCTTTCSAGGAAACSCAGGCAG | 20.1 | 9.33 | 42.8 | 27.7 |
| 1059 | ACACATCCATCCATCCATCCATTCA | 23.1 | 15.7 | 50.2 | 21.5 |
| 2829 | TCTTTCCAGGAAACCCAGGCAGC | 25 | 11.7 | 40.6 | 22.9 |
| 269 | CATACCCAGACACAAACGGCCCAAT | 27.2 | 20.6 | 43.4 | 28 |
| 1142 | CTCTTTTATCCATCCACACACCCAC | 34.4 | 20.1 | 64.3 | 34.7 |
| 3670 | CTCTTTTATCCATCCACACACCC | 40.5 | 15.2 | 82.2 | 45.5 |
| 301 | TCTTTCCAGGAAACCCAGGCAGCTG | 41.6 | 30.5 | 54.2 | 20.8 |
| 5165 | GAAAGTGSCATGGAGSGTGCAAG | 42 | 38.1 | 54 | 32.5 |
| 5198 | ATCTACSCTTTTATCCATSCACACA | 44.5 | 22.4 | 45.5 | 34.4 |
| 1147 | ATCTACTCTTTTATCCATCCACACA | 46.4 | 29.9 | 69.7 | 47.6 |
| 3587 | ACACATCCATCCATCCATCCATT | 47.8 | 24.9 | 122 | 41.9 |
| 5202 | CTACTCTSTTATCCASCCACACA | 48.1 | 35.4 | 76.5 | 37.9 |
| 5199 | ATCTACTCSTTTATCCATSCACACA | 48.2 | 21.5 | 62.8 | 44.3 |
| 5192 | CTTTCAGSAATTCAASCACACAT | 49.6 | 39.2 | 70.9 | 46.3 |
| 3774 | AAGTGTCATGGAGAGTGCAAGGG | 49.8 | 39.3 | 67 | 59.7 |
| 3586 | CACATCCATCCATCCATCCATTC | 51.6 | 14.2 | 80.3 | 41.4 |
| 248 | CAATCCTGAGTGGTTAGGGCTGGAA | 54.2 | 18.8 | 59.6 | 16.2 |
| 263 | CAGACACAAACGGCCCAATCCTGAG | 54.4 | 19.2 | 73.2 | 43.7 |
| 3668 | CTTTTATCCATCCACACACCCAC | 55.4 | 30.5 | 59 | 34.2 |
| 3669 | TCTTTTATCCATCCACACACCCA | 55.7 | 29.2 | 61.1 | 45.6 |
| 5196 | CTCTTTTSTCCATCCSCACACCC | 55.9 | 29.8 | 83.8 | 50.9 |
| 2562 | GGGCAGGCAGGAATGGTGAGTGG | 56.6 | 41 | 73.6 | 47.2 |
| 5141 | TCCACCAGSCACTCACAASCATCCA | 58 | 17.7 | 86.1 | 36.5 |
| 1124 | CACCCACCCATCTAACTACCCCAAA | 58.2 | 42.7 | 91 | 34.4 |
| 2561 | GGCAGGCAGGAATGGTGAGTGGA | 59.1 | 43.9 | 57.9 | 41.1 |
| 5195 | TCTTTTASCCATCCASACACCCA | 63.1 | 23.5 | 54.3 | 40.7 |
| 3652 | CACCCACCCATCTAACTACCCCA | 63.1 | 44.6 | 74.3 | 51.2 |
| 5166 | AAAGTGTSATGGAGASTGCAAGG | 63.7 | 39.2 | 55.5 | 53 |
| 5177 | TGCAATASTTCAACCSCACATCC | 64.1 | 25.7 | 75.7 | 42.9 |
| 5138 | GGGCAGGCSGGAATGGTGSGTGGAA | 64.2 | 32 | 73 | 39 |
| 34 | GGGCAGGCAGGAATGGTGAGTGGAA | 64.6 | 42.2 | 91.2 | 48.4 |
| 5145 | GGCAGGCSGGAATGGSGAGTGGA | 64.6 | 49.5 | 92.8 | 65 |
| 5193 | CTCTTTSATCCATCCACASACCCAC | 65.1 | 34.1 | 53 | 32.2 |
| 3775 | AAAGTGTCATGGAGAGTGCAAGG | 65.3 | 45.4 | 71.2 | 64.2 |
| 5186 | CAGTAATSCAACCACSCATCCAT | 65.5 | 23.7 | 92.7 | 24.1 |
| 5194 | CTCTTTTASCCATCCACASACCCAC | 65.6 | 37.8 | 67.8 | 29.5 |
| 3673 | CTACTCTTTTATCCATCCACACA | 67.1 | 32 | 50.5 | 34 |
| 1078 | ACCTTTCAGTAATTCAACCACACAT | 67.5 | 52.3 | 87.4 | 58 |
| 3776 | GAAAGTGTCATGGAGAGTGCAAG | 68.3 | 52.7 | 52.7 | 38.7 |
| 5197 | CTTTTATSCATCCACSCACCCAC | 68.7 | 58.9 | 59.2 | 33.2 |
| 5189 | ACCTTTCASTAATTCAACSACACAT | 69.2 | 35.5 | 115 | 79.8 |
| 5153 | ACACAAASGGCCCAASCCTGAGT | 69.3 | 54.9 | 114 | 67.4 |
| 5162 | CACCCACSCATCTAASTACCCCA | 71.4 | 65.7 | 111 | 77.3 |
| 5185 | AGTAATTSAACCACASATCCATC | 72 | 16 | 58 | 21.7 |
| 5164 | AAGTGTCSTGGAGAGSGCAAGGG | 72.1 | 51.9 | 70.7 | 59.6 |
| 2788 | ACACAAACGGCCCAATCCTGAGT | 72.4 | 18.3 | 99.8 | 34.6 |
| 3386 | TGCAATAGTTCAACCACACATCC | 74 | 35.8 | 124 | 53.6 |
| 3604 | CTTTCAGTAATTCAACCACACAT | 74.1 | 39.5 | 65.7 | 57.3 |
| 260 | ACACAAACGGCCCAATCCTGAGTGG | 74.3 | 16.6 | 109 | 53.2 |
| 244 | CCTGAGTGGTTAGGGCTGGAATAGA | 75.2 | 42.7 | 92.4 | 35.7 |
| 3605 | CCTTTCAGTAATTCAACCACACA | 76.2 | 42.9 | 145 | 138 |
| 2787 | CACAAACGGCCCAATCCTGAGTG | 76.8 | 37.3 | 91.2 | 46.8 |
| 3651 | ACCCACCCATCTAACTACCCCAA | 77.1 | 52.6 | 87.2 | 59.1 |
| 5200 | TCTACTCSTTTATCCSTCCACAC | 78.2 | 43.6 | 88.6 | 71.7 |
| 5154 | CACAAACSGCCCAATSCTGAGTG | 78.2 | 45.6 | 86.8 | 45.4 |
| 5152 | ACAAACGSCCCAATCSTGAGTGG | 78.3 | 38.8 | 66.1 | 35 |
| 5136 | TCCACCSGCCACTCACAASCATCCA | 78.7 | 73.6 | 120 | 50.9 |
| 3650 | CCCACCCATCTAACTACCCCAAA | 78.9 | 50.3 | 71.8 | 60.4 |
| 5144 | GGGCAGGSAGGAATGSTGAGTGG | 82.7 | 67.3 | 142 | 100 |
| 5173 | CTTGCASTAGTTCAACCASACATCC | 86 | 34.4 | 140 | 132 |
| 5201 | ATCTACTSTTTTATCSATCCACA | 86.3 | 55.6 | 117 | 68.8 |
| 254 | ACGGCCCAATCCTGAGTGGTTAGGG | 86.9 | 44.1 | 108 | 78 |
| 3547 | GATCCGCAACTTAATCCACCTAC | 88.3 | 76.5 | 115 | 86.5 |
| 5137 | GAAAGTSTCATGGAGAGTSCAAGGG | 89.6 | 50.5 | 107 | 42.8 |
| 3675 | ATCTACTCTTTTATCCATCCACA | 91.1 | 60.9 | 89.8 | 70.4 |
| 2786 | ACAAACGGCCCAATCCTGAGTGG | 92.9 | 43.5 | 78.5 | 47.3 |
| 2560 | GCAGGCAGGAATGGTGAGTGGAA | 94 | 74.1 | 118 | 82.7 |
| 5191 | ACCTTTCSGTAATTCSACCACAC | 95.2 | 44.9 | 60.6 | 52.1 |
| 112 | AGGTAAAGGGAATGGCATGGCGGGC | 96 | 49.3 | 115 | 57 |
| 3545 | TCCGCAACTTAATCCACCTACCC | 96 | 82.6 | 111 | 77.3 |
| 1248 | GAAAGTGTCATGGAGAGTGCAAGGG | 96.3 | 58.9 | 118 | 77.8 |
| 5176 | CTTGCAASAGTTCAASCACACAT | 98.9 | 42.4 | 90.8 | 40.8 |
| 3388 | CTTGCAATAGTTCAACCACACAT | 99.5 | 39 | 95.7 | 46.1 |
| 5161 | CCCACCCSTCTAACTSCCCCAAA | 99.7 | 71.7 | 112 | 82.8 |
| 5184 | CAGTAATTSAACCACACASCCATCC | 101 | 95.2 | 128 | 130 |
| 3387 | TTGCAATAGTTCAACCACACATC | 102 | 54.4 | 138 | 55.5 |
| 3606 | ACCTTTCAGTAATTCAACCACAC | 105 | 105 | 120 | 108 |
| 5187 | GTAATTCSACCACACSTCCATCC | 106 | 60.1 | 116 | 48.6 |
| 200 | GTAGTGAGAGTCAACCTGGAGGCCA | 107 | 21.8 | 92.6 | 27.2 |
| 3674 | TCTACTCTTTTATCCATCCACAC | 107 | 71.4 | 83.2 | 56.9 |
| 1260 | CACCATGGGAGAGAAAGTGTCATGG | 108 | 103 | 67.4 | 60.1 |
| 127 | AGGGAGGAGTTTTCCAGGTAAAGGG | 109 | 50.5 | 95.7 | 21.4 |
| 5143 | GCAGGCASGAATGGTSAGTGGAA | 109 | 74.8 | 150 | 98.2 |
| 5163 | ACCCACCSATCTAACSACCCCAA | 112 | 74.4 | 81.6 | 45.8 |
| 5178 | ACACATSCATCCATCCATSCATTCA | 114 | 36.7 | 135 | 39.5 |
| 5175 | TTGCAATSGTTCAACSACACATC | 115 | 54.7 | 98.6 | 51.2 |
| 5134 | AGGGAGSAGTTTTCCAGGSAAAGGG | 116 | 30 | 110 | 29.8 |
| 5182 | ACATCCASCCATCCASCCATTCA | 116 | 50.6 | 111 | 38 |
| 5188 | ACCTTTSAGTAATTCAACSACACAT | 116 | 81.4 | 101 | 74.7 |
| 5142 | GAAAGTGTSATGGAGAGTSCAAGGG | 117 | 40.6 | 115 | 66.2 |
| 5139 | AGGGAGGASTTTTCCAGGSAAAGGG | 118 | 30.4 | 111 | 22.7 |
| 195 | GAGAGTCAACCTGGAGGCCAAGGTG | 118 | 43.8 | 96.1 | 17.9 |
| 3379 | GTTCAACCACACATCCTTCCATT | 119 | 70.8 | 186 | 142 |
| 860 | CTTGCAATAGTTCAACCACACATCC | 120 | 57.3 | 140 | 70.5 |
| 927 | GTCTGTCCACCAGCCACTCACAACC | 120 | 104 | 154 | 122 |
| 3380 | AGTTCAACCACACATCCTTCCAT | 121 | 55 | 161 | 77.7 |
| 5169 | AGTTCAACSACACATCCTSCCATTC | 122 | 71.7 | 129 | 96.7 |
| 5181 | ACACATCSATCCATCSATCCATT | 123 | 40.6 | 108 | 40.9 |
| 3378 | TTCAACCACACATCCTTCCATTC | 124 | 9.97 | 143 | 48.5 |
| 5151 | GAGGAGGSGACCCTGSATCTGGA | 124 | 33.6 | 117 | 67.2 |
| 2639 | GGTAAAGGGAATGGCATGGCGGG | 125 | 50.2 | 110 | 68.5 |
| 5171 | AGTTCAASCACACATSCTTCCAT | 125 | 81.5 | 142 | 155 |
| 5180 | CACATCCSTCCATCCSTCCATTC | 128 | 67 | 89.1 | 32 |
| 5147 | AGGTAAASGGAATGGSATGGCGG | 128 | 77.5 | 149 | 85.4 |
| 5133 | GGGCAGSCAGGAATGGTGSGTGGAA | 129 | 72.2 | 105 | 58.4 |
| 5159 | GATCCGCSACTTAATSCACCTAC | 136 | 111 | 152 | 102 |
| 3598 | GTAATTCAACCACACATCCATCC | 137 | 54 | 107 | 52.1 |
| 5150 | AGAGGAGSTGACCCTSAATCTGG | 139 | 55.6 | 118 | 48.1 |
| 5170 | GTTCAACSACACATCSTTCCATT | 145 | 80.5 | 138 | 84.8 |
| 3600 | CAGTAATTCAACCACACATCCAT | 146 | 47.3 | 119 | 22.7 |
| 5160 | ATCCGCASCTTAATCSACCTACC | 147 | 63.2 | 132 | 76.5 |
| 2640 | AGGTAAAGGGAATGGCATGGCGG | 147 | 82.1 | 148 | 92.8 |
| 5158 | TCCGCAASTTAATCCSCCTACCC | 148 | 97 | 180 | 93.3 |
| 5149 | AGGAGGTSACCCTGASTCTGGAC | 149 | 47.3 | 101 | 58.2 |
| 5168 | AGTTCASCCACACATCCTSCCATTC | 149 | 79 | 132 | 60.8 |
| 5183 | CAGTAASTCAACCACACASCCATCC | 149 | 84.3 | 116 | 53.3 |
| 852 | AGTTCAACCACACATCCTTCCATTC | 151 | 106 | 137 | 114 |
| 5148 | GGTAAAGSGAATGGCSTGGCGGG | 151 | 111 | 106 | 63.6 |
| 1072 | CAGTAATTCAACCACACATCCATCC | 155 | 85.5 | 133 | 58.7 |
| 5172 | TTCAACCSCACATCCSTCCATTC | 156 | 159 | 139 | 80.1 |
| 5174 | CTTGCAATSGTTCAACCASACATCC | 157 | 99.7 | 123 | 77 |
| 42 | GAAGAGCTGGGCAGGCAGGAATGGT | 158 | 99.8 | 160 | 79.5 |
| 1019 | GATCCGCAACTTAATCCACCTACCC | 161 | 73 | 154 | 72 |
| 5179 | ACACATCCSTCCATCCATSCATTCA | 163 | 45.7 | 163 | 44.5 |
| 203 | TGAGTAGTGAGAGTCAACCTGGAGG | 164 | 54.7 | 108 | 59.6 |
| 101 | ATGGCATGGCGGGCAGTCTCAGAGG | 168 | 99.2 | 166 | 76.5 |
| 3599 | AGTAATTCAACCACACATCCATC | 173 | 58.2 | 107 | 51.4 |
| 922 | TCCACCAGCCACTCACAACCATCCA | 173 | 134 | 84.3 | 45.9 |
| 2688 | AGGAGGTGACCCTGAATCTGGAC | 176 | 46.2 | 85.1 | 44.1 |
| 454 | CACGAATCTACCCACCAACTCATCC | 178 | 116 | 140 | 49.4 |
| 2689 | GAGGAGGTGACCCTGAATCTGGA | 182 | 60.1 | 108 | 36.8 |
| 5190 | CCTTTCASTAATTCASCCACACA | 182 | 192 | 114 | 61.7 |
| 66 | TGTGGATGGTGTGGCCAGAAAGAGG | 185 | 70.1 | 156 | 70.7 |
| 3546 | ATCCGCAACTTAATCCACCTACC | 186 | 58.2 | 149 | 63.5 |
| 5146 | GTAAAGGSAATGGCASGGCGGGC | 193 | 116 | 161 | 79.1 |
| 930 | TTCGTCTGTCCACCAGCCACTCACA | 193 | 125 | 119 | 81.2 |
| 937 | TCCATTTTTCGTCTGTCCACCAGCC | 196 | 122 | 113 | 51.4 |
| 2690 | AGAGGAGGTGACCCTGAATCTGG | 197 | 67.6 | 108 | 41.2 |
| 162 | AGAGGAGGTGACCCTGAATCTGGAC | 197 | 92.2 | 119 | 37.6 |
| 77 | GGCCAGGAGAGTGTGGATGGTGTGG | 200 | 74.8 | 162 | 83.3 |
| 2638 | GTAAAGGGAATGGCATGGCGGGC | 205 | 79.8 | 80 | 52 |
| 115 | TCCAGGTAAAGGGAATGGCATGGCG | 215 | 102 | 149 | 127 |
| 108 | AAAGGGAATGGCATGGCGGGCAGTC | 226 | 99.9 | 178 | 113 |
| 277 | GGAAGAGACATACCCAGACACAAAC | 0.02 | 0.00 | 11.43 | 6.56 |
| 282 | CAGCTGGAAGAGACATACCCAGACA | 0.03 | 0.02 | 16.20 | 7.83 |
| 276 | GAAGAGACATACCCAGACACAAACG | 0.94 | 1.59 | 0.61 | 1.01 |
| 306 | AGAGTTCTTTCCAGGAAACCCAGGC | 1.47 | 2.28 | 19.61 | 9.44 |
| 307 | AAGAGTTCTTTCCAGGAAACCCAGG | 3.01 | 2.16 | 21.95 | 5.43 |
| 305 | GAGTTCTTTCCAGGAAACCCAGGCA | 3.49 | 2.07 | 29.80 | 2.76 |
| 304 | AGTTCTTTCCAGGAAACCCAGGCAG | 3.62 | 3.79 | 38.61 | 18.71 |
| 285 | AGGCAGCTGGAAGAGACATACCCAG | 4.63 | 5.37 | 32.99 | 2.70 |
| 274 | AGAGACATACCCAGACACAAACGGC | 5.98 | 6.18 | 12.51 | 6.77 |
| 279 | CTGGAAGAGACATACCCAGACACAA | 6.26 | 10.82 | 58.24 | 12.87 |
| 275 | AAGAGACATACCCAGACACAAACGG | 9.32 | 5.24 | 16.02 | 3.73 |
| 272 | AGACATACCCAGACACAAACGGCCC | 12.07 | 2.14 | 29.94 | 15.81 |
| 284 | GGCAGCTGGAAGAGACATACCCAGA | 12.92 | 4.64 | 50.87 | 17.93 |
| 286 | CAGGCAGCTGGAAGAGACATACCCA | 14.04 | 2.17 | 32.22 | 17.05 |
| 280 | GCTGGAAGAGACATACCCAGACACA | 15.74 | 19.34 | 36.35 | 14.55 |
| 281 | AGCTGGAAGAGACATACCCAGACAC | 18.82 | 10.27 | 20.31 | 17.71 |
| 283 | GCAGCTGGAAGAGACATACCCAGAC | 18.87 | 22.30 | 55.59 | 34.27 |
| 271 | GACATACCCAGACACAAACGGCCCA | 19.96 | 11.08 | 28.25 | 4.42 |
| 273 | GAGACATACCCAGACACAAACGGCC | 21.01 | 9.29 | 26.91 | 8.72 |
| 1057 | ACATCCATCCATCCATCCATTCATC | 21.36 | 5.97 | 63.61 | 8.59 |
| 1058 | CACATCCATCCATCCATCCATTCAT | 23.52 | 1.80 | 108.40 | 54.14 |
| 287 | CCAGGCAGCTGGAAGAGACATACCC | 25.02 | 3.34 | 60.96 | 5.29 |
| 1055 | ATCCATCCATCCATCCATTCATCCA | 25.59 | 10.98 | 86.98 | 36.11 |
| 1059 | ACACATCCATCCATCCATCCATTCA | 27.76 | 4.11 | 72.26 | 37.32 |
| 302 | TTCTTTCCAGGAAACCCAGGCAGCT | 30.66 | 1.40 | 86.91 | 11.41 |
| 301 | TCTTTCCAGGAAACCCAGGCAGCTG | 31.13 | 5.45 | 52.43 | 7.09 |
| 1056 | CATCCATCCATCCATCCATTCATCC | 35.45 | 4.51 | 75.99 | 10.37 |
| 1060 | CACACATCCATCCATCCATCCATTC | 38.25 | 19.28 | 96.63 | 22.67 |
| 270 | ACATACCCAGACACAAACGGCCCAA | 38.57 | 4.68 | 44.89 | 1.89 |
| 1062 | ACCACACATCCATCCATCCATCCAT | 39.40 | 7.68 | 71.32 | 18.18 |
| 1061 | CCACACATCCATCCATCCATCCATT | 39.80 | 8.88 | 77.72 | 2.82 |
| 1063 | AACCACACATCCATCCATCCATCCA | 41.07 | 10.10 | 97.41 | 24.31 |
| 300 | CTTTCCAGGAAACCCAGGCAGCTGG | 42.16 | 22.26 | 77.70 | 9.85 |
| 299 | TTTCCAGGAAACCCAGGCAGCTGGA | 51.84 | 9.47 | 72.21 | 10.14 |
| 269 | CATACCCAGACACAAACGGCCCAAT | 60.89 | 6.26 | 84.01 | 23.09 |

*Unless otherwise noted, each of the nucleosides of antisense oligonucleotides shown are modified nucleosides with 2′-O-(2-methoxyethyl) (2′-MOE) sugar moieties, each “C” is replaced with a 5-methylcytosine (5-MeC), and all internucleoside linkages are phosphorothioate linkages.
A spacer as indicated by S is not a nucleoside. S represents a spacer of Formula (Iia′) as disclosed herein.

### Example 4: Methods for Evaluating UNC13A Antisense Oligonucleotides

[0508] UNC13A antisense oligonucleotides were evaluated in iPSC derived human motor neurons (hMN). The cells were seeded in 96-well plates at a density of 40,000 cells/well. Antisense oligonucleotide (AON) to TDP43 was transfected with Endoporter (Gene Tools, Philomath, OR, USA) to decrease expression of the full length UNC13A transcript and increase expression of UNC13A cryptic exon. Vehicle control consisted of motor neuron treatment with Endoporter alone. Positive controls included cells that were treated with TDP43 AON alone (“AON TDP43” or “TDP43 AON”).

[0509] TDP43 AON is a gapmer oligonucleotide and has the following sequence and chemistry: 5′ A*A*G*G*C*T*T*C*A*T*A*T*T*G*T*A*C*T*T*T 3′ (SEQ ID NO: 5167) where *=phosphorothioate, underlined=DNA, other=2′MOE RNA; each “C” is 5-MeC.

[0510] To evaluate UNC13A AON ability to reduce UNC13A cryptic exon levels, antisense oligonucleotides to UNC13A were co-incubated with TDP43 AON in Endoporter in media before addition to the cells. After 72 hours, antisense oligonucleotides and Endoporter were washed out and replaced with fresh media alone. After six additional days, RNA was collected from the 96-well plates for RT-qPCR. RNA was isolated, cDNA generated and multiplexed RT-qPCR assay performed with Taqman probes for UNC13A cryptic exon, and reference GAPDH quantification.

[0511] Transcript levels (e.g., UNC13A cryptic exon, and TDP43 transcript) were detected by RT-qPCR using Taqman. Specifically, RT-qPCR was performed for detecting GAPDH using Thermofisher® TaqMan Gene Expression Assay Hs03929097_g1. UNC13a cryptic exon was detected using custom sequences.

### UNC13a Cryptic Exon:

Forward Primer:
(SEQ ID NO: 5203)
ATTGTTCTGCACGTCGGT
Reverse Primer:
(SEQ ID NO: 5204)
GTCTGGGTATGTCTCTTCCAG
Probe Sequence:
(SEQ ID NO: 5203)
AGTTCTTTCCAGGAAACCCAGGCA

[0512] To evaluate UNC13A AON ability to reduce UNC13A correctly spliced (CS)exon junction 20/21 levels, antisense oligonucleotides to UNC13A were co-incubated with TDP43 AON in Endoporter in media before addition to the cells. After 72 hours, antisense oligonucleotides and Endoporter were washed out and replaced with fresh media alone. After six additional days, RNA was collected from the 96-well plates for RT-qPCR. RNA was isolated, cDNA generated and multiplexed RT-qPCR assay performed with Taqman probes for UNC13A CS exon 20/21 junction, and reference GAPDH quantification.

[0513] Transcript levels (e.g., UNC13A exon junction 20/21, and TDP43 transcript) were detected by RT-qPCR using Taqman. Specifically, RT-qPCR was performed for detecting GAPDH using Thermofisher® TaqMan Gene Expression Assay Hs03929097_g1. UNC13a exon 20/21 junction was detect using TaqMan Gene Expression Assay Hs01000584_ml.

[0514] RT-qPCR was performed on Applied Biosystems® 7500 Real-time PCR systems. One cycle of reverse transcription was performed at a temperature of 50° C. for 5 min. One cycle of RT inactivation/initial denaturation was performed at a temperature of 95° C. for 20 seconds. Forty five cycles of amplification were performed at a temperature of 95° C. for 1 second followed by 60° C. for 20 seconds.

[0515] UNC13A-cryptic (Ct) was normalized to GAPDH (deltaCt). To visualize the quantitative changes (e.g., % decrease of UNC13A-cryptic), the normalized UNC13A-cryptic signal was further normalized to the vehicle (treated with Endoporter alone, deltadeltaCt).

[0516] Relative quantity (RQ) of transcript level was calculated using the equation RQ=2^{-deltadeltaCt} and is used to describe the treatment condition comparison to normal, healthy levels (1.0). RQ values for UNC13A cryptic were normalized using the following formula:

(((RQAON−RQendo)/(RQTDP43−RQendo))*100

[0517] Table 9 shows the RT-qPCR results of UNC13A AONs with spacers and performance of UNC13A AONs without spacers in human motor neurons.

[0518] As shown in Table 9, UNC13A AONs (e.g., UNC13A oligonucleotides without spacers or with one or two spacers) were tested for their ability to reduce UNC13A transcripts with a cryptic exon. In some cases, UNC13A AONs with spacers reduced UNC13A cryptic exon levels. In some cases, UNC13A AONs without spacers reduced UNC13A cryptic exon levels. Specific AON sequences are labeled according to their corresponding SEQ ID NO.

[0519] Correctly spliced UNC13A (Ct) was also normalized to GAPDH (deltaCt). To visualize the quantitative changes (e.g., % increase of correctly spliced UNC13A), the normalized correctly spliced UNC13A signal was further normalized to the vehicle (treated with Endoporter alone, deltadeltaCt).

[0520] Relative quantity (RQ) of transcript level was calculated using the equation RQ=2\hat{ }(−deltadeltaCt) and is used to describe the treatment condition comparison to normal, healthy levels (1.0). RQ values for UNC13A corrected splicing were normalized using the following formula:

$$( ( ( RQAON - RQTDP 43 ) / ( R Qendo - RQTDP 43 ) ) *$$

TABLE 9
Performance of Exemplary UNC13A AONs evaluated in human derived iPSC motor neurons

| | | UNC13A Corrected | | | | UNC13A Cryptic | | | |
|---|---|---|---|---|---|---|---|---|---|
| | | Splicing | | | | Splicing | | | |
| SEQ | Oligonucleotide | Normalized RQ | | | | Normalized RQ | | | |
| ID | Sequence* | 200nM | | 50nM | | 200nM | | 50nM | |
| NO: | (5′ to 3′) | Mean | STD | Mean | STD | Mean | STD | Mean | STD |
| 276 | GAAGAGACATACCCAGACACAA | 41.82 | 18.84 | −27.56 | 73.08 | 3.16 | 1.03 | 18.87 | 12.38 |
| | ACG | | | | | | | | |
| 2804 | GAAGAGACATACCCAGACACAA | 8.93 | 7.32 | −7.13 | 7.81 | 15.78 | 7.41 | 42.31 | 31.11 |
| | A | | | | | | | | |
| 2803 | AAGAGACATACCCAGACACAAA | −28.45 | 72.83 | −12.62 | 12.84 | 12.06 | 9.62 | 57.27 | 34.91 |
| | C | | | | | | | | |
| 2802 | AGAGACATACCCAGACACAAAC | 13.03 | 15.19 | 9.48 | 11.41 | 14.78 | 6.73 | 61.44 | 25.31 |
| | G | | | | | | | | |
| 2801 | GAGACATACCCAGACACAAACG | 28.03 | 29.67 | 7.69 | 35.17 | 18.53 | 10.52 | 33.25 | 20.41 |
| | G | | | | | | | | |
| 2800 | AGACATACCCAGACACAAACGG | 24.21 | 33.06 | 23.24 | 30.63 | 29.74 | 33.32 | 50.76 | 39.49 |
| | C | | | | | | | | |
| 2799 | GACATACCCAGACACAAACGGC | 2.47 | 35.11 | 2.89 | 26.90 | 26.29 | 25.67 | 46.66 | 32.30 |
| | C | | | | | | | | |
| 285 | AGGCAGCTGGAAGAGACATACC | 47.19 | 57.85 | 15.52 | 30.16 | 2.07 | 3.30 | 13.45 | 13.12 |
| | CAG | | | | | | | | |
| 2813 | AGGCAGCTGGAAGAGACATACC | 37.80 | 13.72 | 1.51 | 9.33 | 2.32 | 3.41 | 22.31 | 14.52 |
| | C | | | | | | | | |
| 2812 | GGCAGCTGGAAGAGACATACCC | 39.83 | 25.50 | 19.20 | 21.74 | 7.01 | 5.73 | 25.13 | 28.23 |
| | A | | | | | | | | |
| 2811 | GCAGCTGGAAGAGACATACCCA | 43.08 | 23.32 | 4.48 | 7.87 | 5.11 | 6.91 | 32.17 | 23.76 |
| | G | | | | | | | | |
| 2810 | CAGCTGGAAGAGACATACCCAG | −21.34 | 16.48 | −144.30 | 28.86 | 7.59 | 6.87 | 21.20 | 16.74 |
| | A | | | | | | | | |
| 2809 | AGCTGGAAGAGACATACCCAGA | −173.70 | 29.80 | −75.73 | 8.72 | 4.20 | 7.60 | 165.20 | 96.22 |
| | C | | | | | | | | |
| 5253 | GCAGCTGSAAGAGACSTACCCA | 64.46 | 20.00 | −11.79 | 20.17 | 2.34 | 1.77 | 17.01 | 6.37 |
| | G | | | | | | | | |
| 5251 | CAGCTGGSAGAGACASACCCAG | 87.01 | 8.70 | 28.35 | 13.19 | 5.72 | 3.41 | 22.86 | 10.45 |
| | A | | | | | | | | |
| 5266 | GTTCTTSCCAGGAAACCCSGGC | −8.32 | 3.39 | −10.50 | 8.45 | 29.49 | 14.34 | 51.95 | 12.36 |
| | AGC | | | | | | | | |
| 5265 | GTTCTTTCSAGGAAACCCSGGC | 6.29 | 22.23 | 6.58 | 3.64 | 8.10 | 5.42 | 28.87 | 7.85 |
| | AGC | | | | | | | | |
| 5269 | AGAGTTCSTTCCAGGSAACCCA | 61.99 | 21.81 | −24.46 | 58.00 | 12.82 | 3.63 | 55.05 | 18.66 |
| | G | | | | | | | | |
| 5267 | GAGTTCTSTCCAGGASACCCAG | 38.47 | 29.10 | −14.70 | 48.97 | 17.11 | 11.96 | 80.63 | 36.03 |
| | G | | | | | | | | |
| 5268 | AGTTCTTSCCAGGAASCCCAGG | 9.90 | 25.86 | −7.31 | 26.47 | 26.33 | 9.18 | 92.35 | 32.38 |
| | C | | | | | | | | |
| 5271 | AGAGTTSTTTCCAGGAAASCCA | 44.52 | 32.61 | 57.40 | 14.54 | 9.44 | 4.83 | 22.79 | 6.99 |
| | GGC | | | | | | | | |
| 5270 | AGAGTTCTSTCCAGGAAASCCA | 44.46 | 8.40 | 48.23 | 22.36 | 3.31 | 2.76 | 14.18 | 10.22 |
| | GGC | | | | | | | | |
| 5243 | GAGACATSCCCAGACSCAAACG | 84.50 | 29.82 | 47.59 | 10.35 | 31.74 | 13.09 | 79.61 | 17.53 |
| | G | | | | | | | | |
| 5241 | AGACATASCCAGACASAAACGG | 90.95 | 10.72 | 22.20 | 40.15 | 30.38 | 13.73 | 82.12 | 14.48 |
| | C | | | | | | | | |
| 5242 | GACATACSCAGACACSAACGGC | 73.81 | 41.97 | 36.23 | 29.75 | 22.06 | 9.58 | 70.87 | 9.37 |
| | C | | | | | | | | |
| 5245 | GAGACASACCCAGACACASACG | 80.40 | 19.16 | 23.13 | 19.81 | 31.05 | 15.73 | 88.26 | 28.47 |
| | GCC | | | | | | | | |
| 5244 | GAGACATASCCAGACACASACG | 126.50 | 25.60 | 88.00 | 43.30 | 17.80 | 10.45 | 77.70 | 25.98 |
| | GCC | | | | | | | | |
| 5257 | AGGCAGSTGGAAGAGACASACC | 96.50 | 22.07 | 44.00 | 25.12 | 10.88 | 6.15 | 35.95 | 13.92 |
| | CAG | | | | | | | | |
| 5256 | AGGCAGCTSGAAGAGACASACC | 103.10 | 12.62 | 66.18 | 15.49 | 4.04 | 2.80 | 27.84 | 10.66 |
| | CAG | | | | | | | | |
| 5255 | AGGCAGCSGGAAGAGSCATACC | 92.83 | 15.27 | 58.96 | 6.90 | 12.26 | 4.78 | 31.13 | 9.49 |
| | C | | | | | | | | |
| 5254 | GGCAGCTSGAAGAGASATACCC | 82.43 | 18.79 | 58.45 | 12.96 | 8.83 | 8.20 | 37.74 | 10.12 |
| | A | | | | | | | | |
| 5252 | AGCTGGASGAGACATSCCCAGA | 87.57 | 8.14 | 9.59 | 32.49 | 7.43 | 3.22 | 28.79 | 15.38 |
| | C | | | | | | | | |
| 5250 | GAAGAGSCATACCCAGACSCAA | 102.70 | 14.83 | 54.28 | 31.30 | 29.53 | 14.04 | 75.86 | 28.78 |
| | ACG | | | | | | | | |
| 5249 | GAAGAGACSTACCCAGACSCAA | 99.18 | 24.63 | 46.29 | 25.42 | 22.36 | 7.32 | 75.43 | 35.92 |
| | ACG | | | | | | | | |
| 5248 | GAAGAGASATACCCASACACAA | 49.24 | 20.69 | 21.53 | 23.44 | 89.72 | 39.56 | 135.70 | 43.02 |
| | A | | | | | | | | |
| 5246 | AAGAGACSTACCCAGSCACAAA | 28.09 | 21.14 | 22.72 | 15.94 | 52.17 | 11.17 | 112.70 | 38.44 |
| | C | | | | | | | | |
| 5247 | AGAGACASACCCAGASACAAAC | 78.70 | 27.23 | 29.31 | 21.53 | 29.70 | 17.53 | 85.44 | 19.01 |
| | G | | | | | | | | |
| 5292 | GTT[LNA-C]TTTSCAGGAAAS | 25.91 | 16.04 | 21.89 | 19.68 | 4.99 | 12.69 | 17.06 | 44.28 |
| | CCA[LNA-G]GCA | | | | | | | | |
| 5291 | GTT[LNA-C]TTTSCAG[LNA- | 19.94 | 10.97 | 10.81 | 5.00 | 20.25 | 27.06 | 28.08 | 34.90 |
| | G]AAASCCA[LNA-G]GCA | | | | | | | | |
| 5290 | GTTCTT[LNA-T]SCAGGAA | 8.93 | 9.25 | 6.86 | 7.65 | −1.28 | 1.43 | 7.60 | 13.16 |
| | [LNA-A]SCCAGGCA | | | | | | | | |
| 5289 | GTTCTT[LNA-T]SCAGGAAA | 0.18 | 4.96 | 12.23 | 11.77 | −1.20 | 1.39 | 29.03 | 35.58 |
| | S[LNA-C]CAGGCA | | | | | | | | |
| 5288 | GTTCTTTS[LNA-C]AGGAAA | 14.39 | 10.91 | 10.40 | 7.95 | 6.29 | 12.97 | 21.83 | 31.86 |
| | S[LNA-C]CAGGCA | | | | | | | | |
| 5287 | GCA[LNA-G]CTGGSAGAGACA | −10.22 | 30.13 | 29.91 | 20.97 | 11.14 | 21.19 | 6.45 | 7.80 |
| | TASCC[LNA-A]GAC | | | | | | | | |
| 5286 | GCA[LNA-G]CTGGSAGA[LNA- | 10.40 | 16.54 | 5.17 | 18.78 | 12.36 | 10.45 | 32.23 | 21.90 |
| | G]ACATASCC[LNA-A]GAC | | | | | | | | |
| 5285 | GCAGCTG[LNA-G]SAGAGACA | 0.57 | 12.49 | −14.07 | 16.60 | 7.76 | 8.69 | 16.24 | 14.15 |
| | T[LNA-A]SCCAGAC | | | | | | | | |
| 5284 | GCAGCTG[LNA-G]SAGAGACA | −6.16 | 17.10 | 7.57 | 18.74 | 14.62 | 9.19 | 46.32 | 24.49 |
| | TAS[LNA-C]CAGAC | | | | | | | | |
| 5283 | GCAGCTGGS[LNA-A]GAGACA | 18.14 | 16.98 | 9.28 | 26.20 | 8.90 | 6.17 | 40.24 | 12.47 |
| | TAS[LNA-C]CAGAC | | | | | | | | |
| 5292 | GTT[LNA-C]TTTSCAGGAAAS | 4.16 | 16.50 | 4.89 | 11.13 | 15.39 | 21.60 | 19.66 | 21.58 |
| | CCA[LNA-G]GCA | | | | | | | | |
| 5291 | GTT[LNA-C]TTTSCAG[LNA- | −0.74 | 10.05 | 1.42 | 8.15 | 11.70 | 16.06 | 52.88 | 33.79 |
| | G]AAASCCA[LNA-G]GCA | | | | | | | | |
| 5290 | GTTCTT[LNA-T]SCAGGAA | −3.14 | 10.20 | 0.93 | 12.63 | 11.03 | 12.72 | 21.48 | 26.72 |
| | [LNA-A]SCCAGGCA | | | | | | | | |
| 5289 | GTTCTT[LNA-T]SCAGGAAA | 0.43 | 5.96 | 0.99 | 9.62 | 6.88 | 15.65 | 39.99 | 36.29 |
| | S[LNA-C]CAGGCA | | | | | | | | |
| 5288 | GTTCTTTS[LNA-C]AGGAAA | −6.06 | 6.61 | −11.46 | 10.35 | 6.58 | 11.97 | 20.12 | 30.75 |
| | S[LNA-C]CAGGCA | | | | | | | | |
| 5241 | AGACATASCCAGACASAAACGG | 37.10 | 22.45 | 53.64 | 15.42 | 43.13 | 22.30 | 79.66 | 21.62 |
| | C | | | | | | | | |
| 5242 | GACATACSCAGACACSAACGGC | 50.01 | 21.60 | 21.58 | 15.74 | 67.02 | 35.41 | 83.55 | 61.27 |
| | C | | | | | | | | |
| 5243 | GAGACATSCCCAGACSCAAACG | 49.95 | 11.51 | 29.51 | 6.61 | 40.47 | 25.79 | 143.30 | 44.64 |
| | G | | | | | | | | |
| 5237 | AGACATA(S1)CCAGACA(S1) | 41.00 | 21.58 | 27.91 | 8.85 | 51.69 | 49.87 | 103.79 | 37.66 |
| | AAACGGC | | | | | | | | |
| 5236 | GACATAC(S1)CAGACAC(S1) | 46.48 | 5.54 | 20.34 | 11.08 | 9.03 | 14.52 | 72.91 | 57.87 |
| | AACGGCC | | | | | | | | |
| 5235 | GAGACAT(S1)CCCAGAC(S1) | 45.33 | 8.89 | 33.99 | 13.59 | 23.89 | 18.73 | 133.34 | 42.50 |
| | CAAACGG | | | | | | | | |
| 5157 | TTCTTTCSAGGAAACSCAGGCA | 11.16 | 8.04 | 9.91 | 7.60 | 5.90 | 10.52 | 94.03 | 74.88 |
| | G | | | | | | | | |
| 5156 | GTTCTTTSCAGGAAASCCAGGC | 5.10 | 4.93 | −8.11 | 6.11 | 12.92 | 15.28 | 25.15 | 25.51 |
| | A | | | | | | | | |
| 5155 | TCTTTCCSGGAAACCSAGGCAG | 10.06 | 10.19 | 3.12 | 11.72 | 6.96 | 9.36 | 26.97 | 9.87 |
| | C | | | | | | | | |
| 5261 | TTCTTTC(S1)AGGAAAC(S1) | 11.38 | 11.69 | 7.69 | 15.12 | 11.99 | 14.32 | 54.16 | 41.27 |
| | CAGGCAG | | | | | | | | |
| 5260 | GTTCTTT(S1)CAGGAAA(S1) | 1.44 | 7.33 | −4.17 | 4.75 | 9.79 | 9.57 | 27.69 | 15.98 |
| | CCAGGCA | | | | | | | | |
| 5259 | TCTTTCC(S1)GGAAACC(S1) | 7.18 | 11.81 | −11.24 | 5.27 | 18.13 | 13.56 | 55.71 | 28.06 |
| | AGGCAGC | | | | | | | | |
| 5182 | ACATCCASCCATCCASCCATTC | −37.97 | 26.85 | −4.07 | 52.32 | 129.74 | 41.79 | 122.30 | 48.42 |
| | A | | | | | | | | |
| 5181 | ACACATCSATCCATCSATCCAT | 5.77 | 35.61 | −11.91 | 27.75 | 96.81 | 38.14 | 111.73 | 35.15 |
| | T | | | | | | | | |
| 5180 | CACATCCSTCCATCCSTCCATT | −14.00 | 37.66 | 1.96 | 30.50 | 159.36 | 43.66 | 164.55 | 47.07 |
| | C | | | | | | | | |
| 5274 | ACATCCA(S1)CCATCCA(S1) | −16.66 | 14.80 | −5.26 | 26.53 | 165.82 | 42.96 | 151.38 | 29.35 |
| | CCATTCA | | | | | | | | |
| 5273 | ACACATC(S1)ATCCATC(S1) | −7.44 | 24.85 | −21.89 | 16.44 | 162.48 | 39.49 | 116.38 | 15.71 |
| | ATCCATT | | | | | | | | |
| 5272 | CACATCC(S1)TCCATCC(S1) | −9.65 | 36.42 | −0.61 | 27.96 | 145.25 | 19.25 | 132.10 | 35.74 |
| | TCCATTC | | | | | | | | |
| 5209 | TCTTTCCAGGAAACCCAGGCA | 18.29 | 17.99 | 9.91 | 14.01 | 16.42 | 18.29 | 16.34 | 9.91 |
| 5220 | CAGGAAACCCAGGCA | 2.74 | 3.88 | 2.44 | 1.85 | 16.24 | 2.74 | 14.66 | 2.44 |
| 5221 | TCTTTCCAGGAAACC | 12.94 | 2.00 | 7.34 | 7.10 | 12.75 | 12.94 | 12.29 | 7.34 |
| 5218 | CCAGGAAACCCAGGCA | 0.00 | 0.00 | 0.74 | 1.05 | 13.49 | 0.00 | 16.04 | 0.74 |
| 5219 | TCTTTCCAGGAAACCC | 17.89 | 25.30 | 17.60 | 2.62 | 18.82 | 17.89 | 15.79 | 17.60 |
| 5216 | TCCAGGAAACCCAGGCA | 0.00 | 0.00 | 1.54 | 2.17 | 14.54 | 0.00 | 15.41 | 1.54 |
| 5217 | TCTTTCCAGGAAACCCA | 6.80 | 9.61 | 2.79 | 1.25 | 12.77 | 6.80 | 15.04 | 2.79 |
| 5214 | TTCCAGGAAACCCAGGCA | 0.70 | 0.98 | 0.00 | 0.00 | 16.31 | 0.70 | 11.42 | 0.00 |
| 5215 | TCTTTCCAGGAAACCCAG | 19.21 | 8.43 | 49.84 | 70.94 | 16.89 | 19.21 | 19.14 | 49.84 |
| 5212 | TTTCCAGGAAACCCAGGCA | 0.55 | 0.78 | 3.96 | 5.60 | 13.97 | 0.55 | 12.15 | 3.96 |
| 5213 | TCTTTCCAGGAAACCCAGG | 11.47 | 8.56 | 2.24 | 3.17 | 16.52 | 11.47 | 15.47 | 2.24 |
| 5210 | CTTTCCAGGAAACCCAGGCA | 6.60 | 0.75 | 1.59 | 2.25 | 18.60 | 6.60 | 12.55 | 1.59 |
| 5211 | TCTTTCCAGGAAACCCAGGC | 15.08 | 15.12 | 11.29 | 4.48 | 15.92 | 15.08 | 12.81 | 11.29 |

*Unless otherwise noted, each of the nucleosides of antisense oligonucleotides shown are modified nucleosides with 2′-O-(2-methoxyethyl) (2′-MOE) sugar moieties, each “C” is replaced with a 5-methylcytosine (5-MeC), and all internucleoside linkages are phosphorothioate linkages.
A spacer, as indicated by any of S, S1, or S#, is not a nucleoside. S represents a spacer of Formula (Iia′) as disclosed herein. S1 represents a spacer of Formula (IIIa′); S# represents a spacer of Formula (IIib′).
[LNA-X] refers to a locked nucleic acid with a corresponding base X (e.g., LNA-A refers to a locked nucleic acid with an adenine nucleobase, LNA-G refers to a locked nucleic acid with a guanine nucleobase, LNA-T refers to a locked nucleic acid with a thymine nucleobase, and LNA-C refers to a locked nucleic acid with a cytosine nucleobase).

### INCORPORATION BY REFERENCE

[0521] The entire disclosure of each of the patent documents and scientific articles cited herein is incorporated by reference for all purposes.

### EQUIVALENTS

[0522] The disclosure can be embodied in other specific forms without departing from the essential characteristics thereof. The foregoing embodiments therefore are to be considered illustrative rather than limiting on the disclosure described herein. The scope of the disclosure is indicated by the appended claims rather than by the foregoing description, and all changes that come within the meaning and range of equivalency of the claims are intended to be embraced therein.

What is claimed is:

1. A compound comprising a modified oligonucleotide comprising a sequence that is at least 85% complementary to an equal length portion of any one of SEQ ID NO: 5057-5065 or SEQ ID NOs: 5206-5208, a sequence having 90% identity thereof, or to a 15 to 50 contiguous nucleobase portion thereof, wherein at least one (i.e., one or more) nucleoside linkage of the oligonucleotide is a non-natural linkage.

2. The compound of claim 1, wherein the modified oligonucleotide comprises a spacer.

3. A compound comprising a modified oligonucleotide comprising a sequence that is at least 85% complementary to an equal length portion of any one of SEQ ID NO: 5057-5065 or SEQ ID NOs: 5206-5208, a sequence having 90% identity thereof, or to a 15 to 50 contiguous nucleobase portion thereof, wherein at least one (i.e., one or more) nucleoside linkage of the oligonucleotide is a non-natural linkage, and further wherein the oligonucleotide comprises a spacer.

4. An oligonucleotide comprising a sequence that is at least 85% complementary to an equal length portion of any one of SEQ ID NO: 5057-5065 or SEQ ID NOs: 5206-5208, a sequence having 90% identity thereof, or to a 15 to 50 contiguous nucleobase portion thereof, wherein at least one (i.e., one or more) nucleoside linkage of the oligonucleotide is a non-natural linkage.

5. The oligonucleotide of claim 4, further comprising a spacer.

6. An oligonucleotide comprising a sequence that is at least 85 98% complementary to an equal length portion of any one of SEQ ID NO: 5057-5065 or SEQ ID NOs: 5206-5208, a sequence having 90% identity thereof, or to a 15 to 50 contiguous nucleobase portion thereof, wherein at least one (i.e., one or more) nucleoside linkage of the oligonucleotide is a non-natural linkage, and further wherein the oligonucleotide comprises a spacer.

7. The compound of claims 1-3 or oligonucleotide of claims 5-6, wherein the oligonucleotide comprises a segment with at most 11 linked nucleosides.

8. The compound of claims 1-3 or 7, or oligonucleotides of claims 5-7, wherein the oligonucleotide comprises a segment with at most 10, 9, or 8 linked nucleosides.

9. The compound of any one of claims 1-3 or 7-8 or oligonucleotide of any one of claims 44-8, wherein the oligonucleotide comprises a segment with at most 7 linked nucleosides.

10. The compound of any one of claims 1-3 or 7-9 or oligonucleotide of any one of claims 5-9, wherein the oligonucleotide comprises a segment with at most 6, 5, 4, 3, or 2 linked nucleosides.

11. The compound of any one of claims 1-3 or 7-10 or oligonucleotide of any one of claims 5-10, wherein every segment of the oligonucleotide comprises at most 7 linked nucleosides.

12. The compound or oligonucleotide of any one of claims 7-11, wherein the oligonucleotide comprises a sequence that shares at least 85% identity with an equal length portion of any one of SEQ ID NOs: 1-1264, SEQ ID NOs: 2529-3792, SEQ ID NOs; 5066-5166, SEQ ID NOs: 5168-5202, SEQ ID NOs: 5209-5221, or SEQ ID NOs: 5235-5292.

13. The compound or oligonucleotide of any one of claims 7-12, wherein the oligonucleotide comprises a sequence that shares at least 90% identity with an equal length portion of any one of SEQ ID NOs: 1-1264, SEQ ID NOs: 2529-3792, SEQ ID NOs; 5066-5166, SEQ ID NOs: 5168-5202, SEQ ID NOs: 5209-5221, or SEQ ID NOs: 5235-5292.

14. The compound or oligonucleotide of any one of claims 7-13, wherein the oligonucleotide comprises a sequence that shares at least 95% identity with an equal length portion of any one of SEQ ID NOs: 1-1264, SEQ ID NOs: 2529-3792, SEQ ID NOs; 5066-5166, SEQ ID NOs: 5168-5202, SEQ ID NOs: 5209-5221, or SEQ ID NOs: 5235-5292.

15. The compound or oligonucleotide of any one of claims 7-13, wherein the oligonucleotide comprises a sequence that shares 100% identity with an equal length portion of any one of SEQ ID NOs: 1-1264, SEQ ID NOs: 2529-3792, SEQ ID NOs; 5066-5166, SEQ ID NOs: 5168-5202, SEQ ID NOs: 5209-5221, or SEQ ID NOs: 5235-5292.

16. The compound or oligonucleotide of any one of claims 7-13, wherein the oligonucleotide comprises a segment with at most 11 linked nucleosides or at most 7 linked nucleosides, and wherein the oligonucleotide comprises a sequence that shares at least 85% identity with an equal length portion of any one of SEQ ID NOs: 1-1264, SEQ ID NOs: 2529-3792, SEQ ID NOs; 5066-5166, SEQ ID NOs: 5168-5202, SEQ ID NOs: 5209-5221, or SEQ ID NOs: 5235-5292.

17. The compound or oligonucleotide of claim 16, wherein the oligonucleotide comprises a segment with at most 6, 5, 4, 3, or 2 linked nucleosides, and wherein the oligonucleotide comprises a sequence that shares at least 85% identity with an equal length portion of any one of SEQ ID NOs: 1-1264, SEQ ID NOs: 2529-3792, SEQ ID NOs; 5066-5166, SEQ ID NOs: 5168-5202, SEQ ID NOs: 5209-5221, or SEQ ID NOs: 5235-5292.

18. The compound or oligonucleotide of claim 16 or 17, wherein the oligonucleotide comprises a segment with at most 6, 5, 4, 3, or 2 linked nucleosides, and wherein the oligonucleotide comprises a sequence that shares at least 90% identity with an equal length portion of any one of SEQ ID NOs: 1-1264, SEQ ID NOs: 2529-3792, SEQ ID NOs: 5168-5202, SEQ ID NOs: 5209-5221, or SEQ ID NOs: 5235-5292.

19. The compound or oligonucleotide of any one of claims 1-18, wherein the oligonucleotide is at least 18, at least 19, at least 20, at least 21, at least 22, at least 23, at least 24, or at least 25 oligonucleotide units in length.

20. The compound or oligonucleotide of claim 19, wherein the oligonucleotide is at least 19 oligonucleotide units in length.

21. The compound or oligonucleotide of any one of claims 1-3 and 5-20, wherein the spacer is a nucleoside-replacement group comprising a non-sugar substitute that is incapable of linking to a nucleotide base.

22. The compound or oligonucleotide of claim 21, wherein the spacer is located between positions 10 and 15 of the oligonucleotide.

23. The compound or oligonucleotide of claim 21, wherein the spacer is located between positions 7 and 11 of the oligonucleotide.

24. The compound or oligonucleotide of claim 21 or 23, wherein the oligonucleotide further comprises a second spacer, wherein the second spacer is located between positions 14 and 22 of the oligonucleotide.

25. The compound or oligonucleotide of claim 24, wherein the spacer and the second spacer are separated by at least 5 nucleobases, at least 6 nucleobases, or at least 7 nucleobases in the oligonucleotide.

26. The compound or oligonucleotide of claim 24 or 25, wherein the spacer is located between positions 7 and 9 of the oligonucleotide, and wherein the second spacer is located between positions 15 and 18 of the oligonucleotide.

27. The compound or oligonucleotide of any one of claims 24-26, wherein the spacer is located at position 8 of the oligonucleotide, and wherein the second spacer is located at position 16 of the oligonucleotide.

28. The compound or oligonucleotide of any one of claims 24-27, wherein the oligonucleotide further comprises a third spacer, wherein the third spacer is located between positions 21 and 24 of the oligonucleotide.

29. The compound or oligonucleotide of claim 21, wherein the spacer is located between positions 2 and 5 of the oligonucleotide.

30. The compound or oligonucleotide of claim 29, wherein the oligonucleotide further comprises a second spacer, wherein the second spacer is located between positions 8 and 12 of the oligonucleotide.

31. The compound or oligonucleotide of claim 30, wherein the oligonucleotide further comprises a third spacer, wherein the third spacer is located between positions 18 and 22 of the oligonucleotide.

32. The compound or oligonucleotide of claim 21, wherein the oligonucleotide further comprises a second spacer and a third spacer, wherein the three spacers are located at positions in the oligonucleotide such that each segment of the oligonucleotide has at most 7 linked nucleosides.

33. The compound or oligonucleotide of claim 32, wherein at least two of the three spacers are adjacent to a guanine nucleobase.

34. The compound or oligonucleotide of claim 33, wherein each of the at least two of the three spacers immediately precede a guanine nucleobase.

35. The compound or oligonucleotide of any one of claims 21-34, wherein each of the first, second or third spacers is a nucleoside-replacement group comprising a non-sugar substitute wherein the non-sugar substitute does not contain a ketone, aldehyde, ketal, hemiketal, acetal, hemiacetal, aminal or hemiaminal moiety and is incapable of forming a covalent bond with a nucleotide base.

36. The compound or oligonucleotide of any one of claims 21-34, wherein each of the first, second or third spacers is independently represented by Formula (X), wherein: [chemical structure]
Ring A is an optionally substituted 4-8 member monocyclic cycloalkyl group or a 4-8 member monocyclic heterocyclyl group, wherein the heterocyclyl group contains 1 or 2 heteroatoms selected from O, S and N, provided that A is not capable of forming a covalent bond to a nucleobase; and
the [chemical structure]
symbol represents the point of connection to an internucleoside linkage.

37. The compound or oligonucleotide of claim 36, wherein each of the first, second or third spacers is independently represented by Formula (Xa), wherein:

[chemical structure]

38. The compound or nucleotide of claim 36 or 37, wherein ring A is an optionally substituted 4-8 member monocyclic cycloalkyl group selected from cyclobutyl, cyclopentyl, cyclohexyl, cycloheptyl and cyclooctyl; or a 4-8 member monocyclic heterocyclyl group, selected from oxetanyl, tetrahydrofuranyl, tetrahydropyranyl, 1,4-dioxanyl, 259pyrrolidinyl, piperidinyl, piperazinyl, morpholinyl and azepanyl.

39. The compound or nucleotide of claim 38 wherein ring A is tetrahydrofuranyl.

40. The compound or nucleotide of claim 38 wherein ring A is tetrahydropyranyl.

41. The compound or oligonucleotide of any one of claims 21-34, wherein each of the first, second or third spacers is independently represented by Formula I, wherein: [chemical structure]
X is selected from —CH₂— and —O—; and
n is 0, 1, 2 or 3.

42. The compound or oligonucleotide of any one of claims 21-34, wherein each of the first, second or third spacers is independently represented by Formula I′, wherein: [chemical structure]
X is selected from —CH₂— and —O—; and
n is 0, 1, 2 or 3.

43. The compound or oligonucleotide of any one of claims 21-34, wherein each of the first, second or third spacers is independently represented by Formula (Ia), wherein: [chemical structure]
and
n is 0, 1, 2 or 3.

44. The compound or oligonucleotide of any one of claims 21-34, wherein each of the first, second or third spacers is independently represented by Formula (Ia′), wherein: [chemical structure]
and
n is 0, 1, 2 or 3.

45. The compound or oligonucleotide of any one of claims 21-34, wherein each of the first, second or third spacers is independently represented by Formula II, wherein: [chemical structure]
and
X is selected from —CH₂— and —O—.

46. The compound or oligonucleotide of any one of claims 21-34, wherein each of the first, second or third spacers is independently represented by Formula II′, wherein: [chemical structure]
and
X is selected from —CH₂— and —O—.

47. The compound or oligonucleotide of any one of claims 21-34, wherein each of the first, second or third spacers is independently represented by Formula (Iia), wherein:

[chemical structure]

48. The compound or oligonucleotide of any one of claims 21-34, wherein each of the first, second or third spacers is independently represented by Formula (Iia′), wherein:

[chemical structure]

49. The compound or oligonucleotide of any one of claims 21-34, wherein each of the first, second or third spacers is independently represented by Formula (IIi), wherein: [chemical structure]
X is selected from —CH₂— and —O—.

50. The compound or oligonucleotide of any one of claims 21-34, wherein each of the first, second or third spacers is independently represented by Formula (IIi′), wherein: [chemical structure]
X is selected from —CH₂— and —O—.

51. The compound or oligonucleotide of any one of claims 21-34, wherein each of the first, second or third spacers is independently represented by Formula (IIib), wherein:

[chemical structure]

52. The compound or oligonucleotide of any one of claims 21-34, wherein each of the first, second or third spacers is independently represented by Formula (IIib′), wherein:

[chemical structure]

53. The compound or oligonucleotide of any one of claims 21-34, wherein each of the first, second or third spacers is independently represented by Formula III, wherein: [chemical structure]
and
X is selected from —CH₂— and —O—.

54. The compound or oligonucleotide of any one of claims 21-34, wherein each of the first, second or third spacers is independently represented by Formula III′, wherein: [chemical structure]
and
X is selected from —CH₂— and —O—.

55. The compound or oligonucleotide of any one of claims 21-34, wherein each of the first, second or third spacers is independently represented by Formula (IIIa), wherein:

[chemical structure]

56. The compound or oligonucleotide of any one of claims 21-34, wherein each of the first, second or third spacers is independently represented by Formula (IIIa′), wherein:

[chemical structure]

57. The compound or oligonucleotide of any one of the above claims, wherein the oligonucleotide further comprises a locked nucleic acid (LNA).

58. The compound or oligonucleotide of claim 57, wherein the locked nucleic acid (LNA) is located at one of positions 4, 7, 9, 12, 15, or 20 of the oligonucleotide.

59. The compound or oligonucleotide of any one of the above claims, wherein the oligonucleotide comprising the spacer has a GC content of at least 10%.

60. The compound or oligonucleotide of any one of the above claims, wherein the oligonucleotide comprising the spacer has a GC content of at least 20%.

61. The compound or oligonucleotide of any one of the above claims, wherein the oligonucleotide comprising the spacer has a GC content of at least 25%.

62. The compound or oligonucleotide of any one of the above claims, wherein the oligonucleotide comprising the spacer has a GC content of at least 30%.

63. The compound or oligonucleotide of any one of the above claims, wherein the oligonucleotide comprising the spacer has a GC content of at least 40%.

64. The compound or oligonucleotide of any one of the above claims, wherein the oligonucleotide comprising the spacer has a GC content of at least 50%.

65. The compound or oligonucleotide of any one of the above claims, wherein the oligonucleotide is between 12 and 40 oligonucleotide units in length.

66. The compound or oligonucleotide of any one of the above claims, wherein at least one (i.e., one or more) nucleoside linkage of the oligonucleotide is independently selected from the group consisting of a phosphodiester linkage, a phosphorothioate linkage, an alkyl phosphate linkage, a phosphorodithioate linkage, a phosphotriester linkage, an alkylphosphonate linkage, a 3-methoxypropyl phosphonate linkage, a methylphosphonate linkage, an aminoalkylphosphotriester linkage, an alkylene phosphonate linkage, a phosphinate linkage, a phosphoramidate linkage, a phosphoramidothioate linkage, a thiophosphorodiamidate linkage, a phosphorodiamidate linkage, an aminoalkylphosphoramidate linkage, a thiophosphoramidate linkage, a thionoalkylphosphonate linkage, a thionoalkylphosphotriester linkage, a thiophosphate linkage, a selenophosphate linkage, and a boranophosphate linkage.

67. The compound or oligonucleotide of any one of claims 1-66, wherein one or more nucleoside linkages that link a base at position 3 or position 4 of the oligonucleotide are phosphodiester linkages.

68. The compound or oligonucleotide of claim 67, wherein only one nucleoside linkage that links a base at position 3 or position 4 of the oligonucleotide is a phosphodiester linkage.

69. The compound or oligonucleotide of any one of claims 1-66, wherein nucleoside linkages that link bases at both position 3 and position 4 of the oligonucleotide are phosphodiester linkages.

70. The compound or oligonucleotide of any one of claims 1-66, wherein one or more bases immediately preceding a spacer in the oligonucleotide are linked through phosphodiester bonds.

71. The compound or oligonucleotide of claim 70, wherein only the base immediately preceding the spacer in the oligonucleotide is linked to the spacer through a phosphodiester bond.

72. The compound or oligonucleotide of claim 71, wherein the base immediately preceding the spacer in the oligonucleotide is further linked to a further preceding base through a phosphodiester bond.

73. The compound or oligonucleotide of claim 71, wherein the oligonucleotide comprises a second spacer, wherein a base immediately preceding the second spacer is linked to a further preceding base through a phosphodiester bond.

74. The compound or oligonucleotide of any one of claims 1-66, wherein one or more bases immediately succeeding a spacer in the oligonucleotide are linked through phosphodiester bonds.

75. The compound or oligonucleotide of claim 74, wherein only the base immediately succeeding the spacer in the oligonucleotide is linked to the spacer through a phosphodiester bond.

76. The compound or oligonucleotide of claim 70, wherein two bases immediately preceding the spacer in the oligonucleotide are linked through phosphodiester bonds.

77. The compound or oligonucleotide of any one of claims 1-66, wherein one or more bases immediately preceding a spacer in the oligonucleotide are linked through phosphodiester bonds and wherein one or more bases immediately succeeding the spacer in the oligonucleotide are linked through phosphodiester bonds.

78. The compound or oligonucleotide of claim 77, wherein one base immediately preceding the spacer and one base immediately succeeding the spacer are linked through phosphodiester bonds.

79. The compound or oligonucleotide of claim 77 or 78, wherein the oligonucleotide includes a second spacer, and wherein one or more bases immediately preceding the second spacer in the oligonucleotide are linked through phosphodiester bonds and wherein one or more bases immediately succeeding the second spacer in the oligonucleotide are linked through phosphodiester bonds.

80. The compound or oligonucleotide of claim 79, wherein one base immediately preceding the second spacer and one base immediately succeeding the second spacer are linked through phosphodiester bonds.

81. The compound or oligonucleotide of any one of claims 1-66, wherein the oligonucleotide comprises a range of bases that are linked through phosphodiester bonds, the range of bases comprising at least two bases.

82. The compound or oligonucleotide of any one of claims 1-66, wherein the oligonucleotide comprises a range of bases that are linked through phosphodiester bonds, the range of bases comprising at least five bases.

83. The compound or oligonucleotide of claim 81 or 82, wherein the oligonucleotide comprises two or more spacers, and wherein the range of bases are positioned between the at least two spacers.

84. A compound comprising an oligonucleotide comprising a nucleobase sequence that shares at least 90% identity to an equal length portion of any one of SEQ ID NOs: 1-1264, SEQ ID NOs: 2529-3792, SEQ ID NOs; 5066-5166, SEQ ID NOs: 5168-5202, SEQ ID NOs: 5209-5221, or SEQ ID NOs: 5235-5292.

85. An oligonucleotide comprising a nucleobase sequence that shares at least 90% identity to an equal length portion of any one of SEQ ID NOs: 1-1264, SEQ ID NOs: 2529-3792, SEQ ID NOs; 5066-5166, or SEQ ID NOs: 5168-5202.

86. The compound of claim 84 or the oligonucleotide of claim 84 or 85, wherein the nucleobase sequence shares at least 95% identity to an equal length portion of any one of SEQ ID NOs: 1-1264, SEQ ID NOs: 2529-3792, SEQ ID NOs; 5066-5166, SEQ ID NOs: 5168-5202, SEQ ID NOs: 5209-5221, or SEQ ID NOs: 5235-5292.

87. The compound of claim 84 or the oligonucleotide of claim 84 or 85, wherein the nucleobase sequence shares at least 100% identity to an equal length portion of any one of SEQ ID NOs: 1-1264, SEQ ID NOs: 2529-3792, SEQ ID NOs; 5066-5166, SEQ ID NOs: 5168-5202, SEQ ID NOs: 5209-5221, or SEQ ID NOs: 5235-5292.

88. The compound or oligonucleotide of any of claims 67-87, wherein the oligonucleotide is any one of a 19mer, 21mer, 23mer, or 25mer.

89. The compound or oligonucleotide of any one of the above claims, wherein one or more internucleoside linkage of the oligonucleotide is a modified internucleoside linkage.

90. The compound or oligonucleotide of claim 89, wherein the modified internucleoside linkage of the oligonucleotide is a phosphorothioate linkage.

91. The compound or oligonucleotide of claim 89 or 90, wherein all internucleoside linkages of the oligonucleotide are phosphorothioate linkages.

92. The compound or oligonucleotide of claim 90, wherein the phosphorothioate linkage is in one of a Rp configuration or a Sp configuration.

93. The compound or oligonucleotide of any one of the preceding claims, wherein the oligonucleotide comprises at least one modified sugar moiety.

94. The compound or oligonucleotide of claim 93, wherein the modified sugar moiety is one of a 2′-OMe modified sugar moiety, bicyclic sugar moiety, 2′-O-(2-methoxyethyl) (2′-MOE), 2′-deoxy-2′-fluoro nucleoside, 2′-fluoro-β-D-arabinonucleoside, locked nucleic acid (LNA), constrained ethyl 2′-4′-bridged nucleic acid (cEt), S-cEt, tcDNA, hexitol nucleic acids (HNA), and tricyclic analog (e.g., tcDNA).

95. The compound or oligonucleotide of any one of the above claims, wherein the oligonucleotide exhibits at least a 30%, 40%, 50%, 60%, 70%, 80%, or 90% increase of full length UNC13A protein.

96. The compound or oligonucleotide of any one of the above claims, wherein the oligonucleotide exhibits at least a 100% increase of full length UNC13A protein.

97. The compound or oligonucleotide of any one of the above claims, wherein the oligonucleotide exhibits at least a 200% increase of full length UNC13A protein.

98. The compound or oligonucleotide of any one of the above claims, wherein the oligonucleotide exhibits at least a 300% increase of full length UNC13A protein.

99. The compound or oligonucleotide of any one of the above claims, wherein the oligonucleotide exhibits at least a 400% increase of full length UNC13A protein.

100. The compound or oligonucleotide of any one of claims 95-99, wherein increase of the full length UNC13A protein is measured in comparison to a reduced level of full length UNC13A protein achieved using a TDP43 antisense oligonucleotide.

101. The compound or oligonucleotide of any one of the above claims, wherein the oligonucleotide exhibits at least a 10%, 20%, 30%, 40%, 50%, 60%, 70%, 80%, 90%, or 100% rescue of full length UNC13A protein.

102. The compound or oligonucleotide of any one of the above claims, wherein the oligonucleotide exhibits at least a 50%, 60%, 70%, 80%, or 90% reduction of a mis-spliced UNC13A transcript.

103. A method of treating a neurological disease and/or a neuropathy in a patient in need thereof, the method comprising administering to the patient a compound or an oligonucleotide of any one of claims 1-102.

104. The method of claim 103, wherein the neurological disease selected from the group consisting of amyotrophic lateral sclerosis (ALS), frontotemporal dementia (FTD), ALS with FTD, Alzheimer's disease (AD), Parkinson's disease (PD), Huntington's disease, progressive supranuclear palsy (PSP), brain trauma, spinal cord injury, corticobasal degeneration (CBD), nerve injuries (e.g., brachial plexus injuries), neuropathies (e.g., chemotherapy induced neuropathy), TDP43 proteinopathies (e.g., chronic traumatic encephalopathy, Perry Syndrome, Dementia with Lewy body in association with Alzheimer's disease, Parkinson's disease with or without dementia, Limbic-predominant age-related TDP-43 encephalopathy (LATE)), epilepsy, Cerebral Age-Related TDP-43 With Sclerosis (CARTS), facial onset sensory and motor neuronopathy, Guam Parkinson-dementia complex, multisystem proteinopathy, CTE, and synaptic diseases like autism.

105. The method of claim 104, wherein the neurological disease is ALS.

106. The method of claim 104, wherein the neurological disease is FTD.

107. The method of claim 104, wherein the neurological disease is ALS with FTD.

108. The method of claim 104, wherein the neurological disease is AD.

109. The method of claim 104, wherein the neurological disease is PD.

110. The method of claim 103, wherein the neuropathy is chemotherapy induced neuropathy.

111. A method of restoring axonal outgrowth and/or regeneration of a neuron, the method comprising exposing the neuron to a compound or an oligonucleotide of any one of claims 1-102.

112. A method of increasing, promoting, stabilizing, or maintaining UNC13A expression and/or function in a neuron, the method comprising exposing the cell to a compound or an oligonucleotide of any one of claims 1-102.

113. The method of claim 111 or 112, wherein the neuron is a motor neuron.

114. The method of claim 111 or 112, wherein the neuron is a spinal cord neuron.

115. The method of any one of claims 111-114, wherein the neuron is a neuron of a patient in need of treatment of a neurological disease and/or a neuropathy.

116. The method of claim 115, wherein the neuropathy is chemotherapy induced neuropathy.

117. The method of any one of claims 111-116, wherein the exposing is performed in vivo or ex vivo.

118. The method of any one of claims 111-116, wherein the exposing comprises administering the oligonucleotide to a patient in need thereof.

119. The method of any one of claims 111-118, wherein the oligonucleotide is administered topically, parenterally, intrathecally, intrathalamically, intracisternally, orally, rectally, buccally, sublingually, vaginally, pulmonarily, intratracheally, intranasally, transdermally, intraduodenally, or intracerebroventricularly.

120. The method of claim 119, wherein the oligonucleotide is administered orally.

121. The method of any one of claims 111-119, wherein a therapeutically effective amount of the oligonucleotide is administered intrathecally, intrathalamically or intracisternally.

122. The method of any one of claims 111-121, wherein the patient is a human.

123. A pharmaceutical composition comprising the oligonucleotide of any one of claims 1-102, or a pharmaceutically acceptable salt thereof, and a pharmaceutically acceptable excipient.

124. The pharmaceutical composition of claim 123, wherein the pharmaceutical composition is suitable for topical, intrathecal, intrathalamic, intracisternal, intracerebroventricular, parenteral, oral, pulmonary, intratracheal, intranasal, transdermal, rectal, buccal, sublingual, vaginal, or intraduodenal administration.

125. A method of treating a neurological disease or a neuropathy in a patient in need thereof, the method comprising administering to a patient in need thereof a therapeutically effective amount of a pharmaceutical composition of claim 123 or 124.

126. The method of claim 125, wherein the neurological disease is selected from the group consisting of amyotrophic lateral sclerosis (ALS), frontotemporal dementia (FTD), ALS with FTD, Alzheimer's disease (AD), Parkinson's disease (PD), Parkinson's Disease with dementia, dementia with lewy bodies, synucleinopathies, Huntington's disease, Brachial plexus injuries, peripheral nerve injuries, progressive supranuclear palsy (PSP), brain trauma, spinal cord injury, tuberous sclerosis complex, Pick's Disease, tauopathies, primary age-related tauopathy, Down Syndrome, epilepsy/seizure disorder, depression, traumatic brain injury (TBI), chronic traumatic encephalopathy (CTE), HIV-associated neurocognitive disorders (HAND), multisystem atrophy, amnestic mild cognitive impairment, corticobasal degeneration (CBD) and/or neuropathies such a chemotherapy induced neuropathy, Spinocerebellar ataxia (SCA), SCA type 2, Spinal Muscular Atrophy (SMA), Parkinsonism, Niemann-Pick disease type C (NPC), Charcot-Marie-Tooth Disease (CMT), Mucopolysaccharidosis type II (MPSIIA), Mucolipidosis IV, GM1 gangliosidosis, Sporadic inclusion body myositis (sIBM), Henoch-Schonlein purpura (HSP), Limbic-predominant age-related TDP-43 encephalopathy (LATE)), Cerebral Age-Related TDP-43 With Sclerosis (CARTS), Gaucher's disease, and facial onset sensory and motor neuronopathy, Guam Parkinson-dementia complex, multisystem proteinopathy, Perry disease, and synaptic diseases like autism.

127. The method of claim 126, wherein the neurological disease is ALS.

128. The method of claim 126, wherein the neurological disease is FTD.

129. The method of claim 126, wherein the neurological disease is ALS with FTD.

130. The method of claim 126, wherein the neurological disease is AD.

131. The method of claim 126, wherein the neurological disease is PD.

132. The method of claim 125, wherein the neuropathy is chemotherapy induced neuropathy.

133. The method of any one of claims 125-132, wherein the pharmaceutical composition is administered topically, parenterally, orally, pulmonarily, rectally, buccally, sublingually, vaginally, intratracheally, intranasally, intracisternally, intrathecally, intrathalamically, transdermally, intraduodenally, or intracerebroventricularly.

134. The method of any one of claims 125-132, wherein the pharmaceutical composition is administered intrathecally, intrathalamically, or intracisternally.

135. The method of any one of claims 125-134, wherein a therapeutically effective amount of the oligonucleotide is administered intrathecally, intrathalamically or intracisternally.

136. The method of any one of claims 125-135, wherein the patient is human.

137. A method for treating a neurological disease in a subject in need thereof, the method comprising administering to the subject an oligonucleotide comprising a segment with at most 7 linked nucleosides, and wherein oligonucleotide shares at least 85% identity with any one of SEQ ID NOs: 1-1264, SEQ ID NOs: 2529-3792, SEQ ID NOs; 5066-5166, SEQ ID NOs: 5168-5202, SEQ ID NOs: 5209-5221, or SEQ ID NOs: 5235-5292, or a pharmaceutically acceptable salt thereof;
wherein at least one (i.e., one or more) nucleoside linkage of the oligonucleotide is independently selected from the group consisting of: a phosphodiester linkage, a phosphorothioate linkage, an alkyl phosphate linkage, a phosphorodithioate linkage, a phosphotriester linkage, an alkylphosphonate linkage, a 3-methoxypropyl phosphonate linkage, a methylphosphonate linkage, an aminoalkylphosphotriester linkage, an alkylene phosphonate linkage, a phosphinate linkage, a phosphoramidate linkage, a phosphoramidothioate linkage, a thiophosphorodiamidate linkage, a phosphorodiamidate linkage, an aminoalkylphosphoramidate linkage, a thiophosphoramidate linkage, a thionoalkylphosphonate linkage, a thionoalkylphosphotriester linkage, a thiophosphate linkage, a selenophosphate linkage, and a boranophosphate linkage, and/or
wherein at least one (i.e., one or more) nucleoside is substituted with a component selected from the group consisting of a 2′-O-(2-methoxyethyl) nucleoside, a 2′-O-methyl nucleoside, a 2′-O—(N-methylacetamide) nucleoside, a 2′-deoxy-2′-fluoro nucleoside, a 2′-fluoro-β-D-arabinonucleoside, a locked nucleic acid (LNA), a tricyclic nucleic acid, constrained methoxyethyl (cMOE), constrained ethyl (cET), and a peptide nucleic acid (PNA)
optionally, wherein the oligonucleotide further comprises a spacer.

138. A method for treating amyotrophic lateral sclerosis (ALS) in a subject in need thereof, the method comprising administering to the subject an oligonucleotide comprising a segment with at most 7 linked nucleosides, and wherein oligonucleotide shares at least 85% identity with any one of SEQ ID NOs: 1-1264, SEQ ID NOs: 2529-3792, SEQ ID NOs; 5066-5166, SEQ ID NOs: 5168-5202, SEQ ID NOs: 5209-5221, or SEQ ID NOs: 5235-5292, or a pharmaceutically acceptable salt thereof;
wherein at least one (i.e., one or more) nucleoside linkage of the oligonucleotide is independently selected from the group consisting of: a phosphodiester linkage, a phosphorothioate linkage, an alkyl phosphate linkage, a phosphorodithioate linkage, a phosphotriester linkage, an alkylphosphonate linkage, a 3-methoxypropyl phosphonate linkage, a methylphosphonate linkage, an aminoalkylphosphotriester linkage, an alkylene phosphonate linkage, a phosphinate linkage, a phosphoramidate linkage, a phosphoramidothioate linkage, a thiophosphorodiamidate linkage, a phosphorodiamidate linkage, an aminoalkylphosphoramidate linkage, a thiophosphoramidate linkage, a thionoalkylphosphonate linkage, a thionoalkylphosphotriester linkage, a thiophosphate linkage, a selenophosphate linkage, and a boranophosphate linkage, and/or
wherein at least one (i.e., one or more) nucleoside is substituted with a component selected from the group consisting of a 2′-O-(2-methoxyethyl) nucleoside, a 2′-O-methyl nucleoside, a 2′-O—(N-methylacetamide) nucleoside, a 2′-deoxy-2′-fluoro nucleoside, a 2′-fluoro-β-D-arabinonucleoside, a locked nucleic acid (LNA), a tricyclic nucleic acid, constrained methoxyethyl (cMOE), constrained ethyl (cET), and a peptide nucleic acid (PNA)
optionally, wherein the oligonucleotide further comprises a spacer.

139. A method for treating Alzheimer's Disease (AD) with frontotemporal dementia (FTD) in a subject in need thereof, the method comprising administering to the subject an oligonucleotide comprising a segment with at most 7 linked nucleosides, and wherein oligonucleotide shares at least 85% identity with any one of SEQ ID NOs: 1-1264, SEQ ID NOs: 2529-3792, SEQ ID NOs; 5066-5166, SEQ ID NOs: 5168-5202, SEQ ID NOs: 5209-5221, or SEQ ID NOs: 5235-5292, or a pharmaceutically acceptable salt thereof,
wherein at least one (i.e., one or more) nucleoside linkage of the oligonucleotide is independently selected from the group consisting of: a phosphodiester linkage, a phosphorothioate linkage, an alkyl phosphate linkage, a phosphorodithioate linkage, a phosphotriester linkage, an alkylphosphonate linkage, a 3-methoxypropyl phosphonate linkage, a methylphosphonate linkage, an aminoalkylphosphotriester linkage, an alkylene phosphonate linkage, a phosphinate linkage, a phosphoramidate linkage, a phosphoramidothioate linkage, a thiophosphorodiamidate linkage, a phosphorodiamidate linkage, an aminoalkylphosphoramidate linkage, a thiophosphoramidate linkage, a thionoalkylphosphonate linkage, a thionoalkylphosphotriester linkage, a thiophosphate linkage, a selenophosphate linkage, and a boranophosphate linkage, and/or
wherein at least one (i.e., one or more) nucleoside is substituted with a component selected from the group consisting of a 2′-O-(2-methoxyethyl) nucleoside, a 2′-O-methyl nucleoside, a 2′-O—(N-methylacetamide) nucleoside, a 2′-deoxy-2′-fluoro nucleoside, a 2′-fluoro-β-D-arabinonucleoside, a locked nucleic acid (LNA), a tricyclic nucleic acid, constrained methoxyethyl (cMOE), constrained ethyl (cET), and a peptide nucleic acid (PNA), optionally, wherein the oligonucleotide further comprises a spacer

140. A method for treating frontotemporal dementia (FTD) in a subject in need thereof, the method comprising administering to the subject an oligonucleotide comprising a segment with at most 7 linked nucleosides, and wherein oligonucleotide shares at least 85% identity with any one of SEQ ID NOs: 1-1264, SEQ ID NOs: 2529-3792, SEQ ID NOs; 5066-5166, SEQ ID NOs: 5168-5202, SEQ ID NOs: 5209-5221, or SEQ ID NOs: 5235-5292, or a pharmaceutically acceptable salt thereof;
wherein at least one (i.e., one or more) nucleoside linkage of the oligonucleotide is independently selected from the group consisting of: a phosphodiester linkage, a phosphorothioate linkage, an alkyl phosphate linkage, a phosphorodithioate linkage, a phosphotriester linkage, an alkylphosphonate linkage, a 3-methoxypropyl phosphonate linkage, a methylphosphonate linkage, an aminoalkylphosphotriester linkage, an alkylene phosphonate linkage, a phosphinate linkage, a phosphoramidate linkage, a phosphoramidothioate linkage, a thiophosphorodiamidate linkage, a phosphorodiamidate linkage, an aminoalkylphosphoramidate linkage, a thiophosphoramidate linkage, a thionoalkylphosphonate linkage, a thionoalkylphosphotriester linkage, a thiophosphate linkage, a selenophosphate linkage, and a boranophosphate linkage, and/or
wherein at least one (i.e., one or more) nucleoside is substituted with a component selected from the group consisting of a 2′-O-(2-methoxyethyl) nucleoside, a 2′-O-methyl nucleoside, a 2′-O—(N-methylacetamide) nucleoside, a 2′-deoxy-2′-fluoro nucleoside, a 2′-fluoro-β-D-arabinonucleoside, a locked nucleic acid (LNA), a tricyclic nucleic acid, constrained methoxyethyl (cMOE), constrained ethyl (cET), and a peptide nucleic acid (PNA)
optionally, wherein the oligonucleotide further comprises a spacer.

141. A method for treating amyotrophic lateral sclerosis (ALS) with frontotemporal dementia (FTD) in a subject in need thereof, the method comprising administering to the subject an oligonucleotide comprising a segment with at most 7 linked nucleosides, and wherein oligonucleotide shares at least 85% identity with any one of SEQ ID NOs: 1-1264, SEQ ID NOs: 2529-3792, SEQ ID NOs; 5066-5166, SEQ ID NOs: 5168-5202, SEQ ID NOs: 5209-5221, or SEQ ID NOs: 5235-5292, or a pharmaceutically acceptable salt thereof;
wherein at least one (i.e., one or more) nucleoside linkage of the oligonucleotide is independently selected from the group consisting of: a phosphodiester linkage, a phosphorothioate linkage, an alkyl phosphate linkage, a phosphorodithioate linkage, a phosphotriester linkage, an alkylphosphonate linkage, a 3-methoxypropyl phosphonate linkage, a methylphosphonate linkage, an aminoalkylphosphotriester linkage, an alkylene phosphonate linkage, a phosphinate linkage, a phosphoramidate linkage, a phosphoramidothioate linkage, a thiophosphorodiamidate linkage, a phosphorodiamidate linkage, an aminoalkylphosphoramidate linkage, a thiophosphoramidate linkage, a thionoalkylphosphonate linkage, a thionoalkylphosphotriester linkage, a thiophosphate linkage, a selenophosphate linkage, and a boranophosphate linkage, and/or
wherein at least one (i.e., one or more) nucleoside is substituted with a component selected from the group consisting of a 2′-O-(2-methoxyethyl) nucleoside, a 2′-O-methyl nucleoside, a 2′-O—(N-methylacetamide) nucleoside, a 2′-deoxy-2′-fluoro nucleoside, a 2′-fluoro-β-D-arabinonucleoside, a locked nucleic acid (LNA), a tricyclic nucleic acid, constrained methoxyethyl (cMOE), constrained ethyl (cET), and a peptide nucleic acid (PNA)
optionally, wherein the oligonucleotide further comprises a spacer.

142. The method of any one of claims 137-141, wherein nucleoside linkages that link a base at position 3 or position 4 of the oligonucleotide are phosphodiester linkages.

143. The method of claim 142, wherein only one nucleoside linkage that links a base at position 3 or position 4 of the oligonucleotide is a phosphodiester linkage.

144. The method of any one of claims 137-141, wherein nucleoside linkages that link bases at both position 3 and position 4 of the oligonucleotide are phosphodiester linkages.

145. The method of any one of claims 137-141, wherein one or more bases immediately preceding a spacer in the oligonucleotide are linked through phosphodiester bonds.

146. The method of claim 145, wherein only the base immediately preceding the spacer in the oligonucleotide is linked to the spacer through a phosphodiester bond.

147. The method of claim 146, wherein the base immediately preceding the spacer in the oligonucleotide is further linked to a further preceding base through a phosphodiester bond.

148. The method of claim 146, wherein the oligonucleotide comprises a second spacer, wherein a base immediately preceding the second spacer is linked to a further preceding base through a phosphodiester bond.

149. The method of any one of claims 137-141, wherein one or more bases immediately succeeding a spacer in the oligonucleotide are linked through phosphodiester bonds.

150. The method of claim 149, wherein only the base immediately succeeding the spacer in the oligonucleotide is linked to the spacer through a phosphodiester bond.

151. The method of any one of claims 137-141, wherein two bases immediately preceding the spacer in the oligonucleotide are linked through phosphodiester bonds.

152. The method of any one of claims 137-141, wherein one or more bases immediately preceding a spacer in the oligonucleotide are linked through phosphodiester bonds and wherein one or more bases immediately succeeding the spacer in the oligonucleotide are linked through phosphodiester bonds.

153. The method of claim 152, wherein one base immediately preceding the spacer and one base immediately succeeding the spacer are linked through phosphodiester bonds.

154. The method of claim 152 or 153, wherein the oligonucleotide includes a second spacer, and wherein one or more bases immediately preceding the second spacer in the oligonucleotide are linked through phosphodiester bonds and wherein one or more bases immediately succeeding the second spacer in the oligonucleotide are linked through phosphodiester bonds.

155. The method of claim 154, wherein one base immediately preceding the second spacer and one base immediately succeeding the second spacer are linked through phosphodiester bonds.

156. The method of any one of claims 137-141, wherein the oligonucleotide comprises a range of bases that are linked through phosphodiester bonds, the range of bases comprising at least two bases.

157. The method of any one of claims 137-141, wherein the oligonucleotide comprises a range of bases that are linked through phosphodiester bonds, the range of bases comprising at least five bases.

158. The method of claim 156 or 157, wherein the oligonucleotide comprises two or more spacers, and wherein the range of bases are positioned between the at least two spacers.

159. The method of any of claims 142-158, wherein the oligonucleotide is any one of a 19mer, 21mer, 23mer, or 25mer.

160. The method of any one of claims 137-141, wherein at least one (i.e., one or more) internucleoside linkage of the oligonucleotide is a phosphorothioate linkage.

161. The method of any one of claims 137-141, wherein all internucleoside linkages of the oligonucleotide are phosphorothioate linkages.

162. An oligonucleotide and a pharmaceutically acceptable excipient, the oligonucleotide comprising a sequence that is at least 85% complementary to an equal length portion of any one of SEQ ID NOs: 5057-5065 or SEQ ID NOs: 5206-5208, a sequence having 90% identity thereof, or to a 15 to 50 contiguous nucleobase portion thereof, optionally wherein the oligonucleotide comprises a spacer and wherein the oligonucleotide is capable of increasing, restoring, or stabilizing expression of the UNC13A mRNA capable of translation of a functional UNC13A and/or activity and/or function of UNC13A protein in a cell or a human patient of an immune-mediated demyelinating disease, and wherein the level of increase, restoration, or stabilization of expression and/or activity and/or function is sufficient for use of the oligonucleotide as a medicament for the treatment of the immune-mediated demyelinating disease.

163. The method of any one of claims 103-122 or 125-161, the pharmaceutical composition of claim 123 or 124, or the oligonucleotide of any one of claims 1-102 or 162, wherein the oligonucleotide comprises one or more chiral centers and/or double bonds.

164. The method of any one of claims 103-122, 125-161, or 163, the pharmaceutical composition of claim 123, 124, or 163, or the oligonucleotide of any one of claims 1-102 or 162-163, wherein the oligonucleotide exist as stereoisomers selected from geometric isomers, enantiomers, and diastereomers.

165. A method of treating a neurological disease and/or a neuropathy in a patient in need thereof, the method comprising administering to a patient in need thereof a therapeutically effective amount of a pharmaceutical composition of claim 123 or 124, in combination with a second therapeutic agent.

166. The method of claim 165, wherein the second therapeutic agent is selected from Riluzole (Rilutek), PrimeC, Edaravone (Radicava), rivastigmine, donepezil, galantamine, selective serotonin reuptake inhibitor, antipsychotic agents, cholinesterase inhibitors, memantine, benzodiazepine antianxiety drugs, AMX0035 (ELYBRIO), ZILUCOPLAN (RA101495), pridopidine, dual AON intrathecal administration (e.g., BIIB067, BIIB078, and BIIB105), BIIB100, levodopa/carbidopa, dopaminergic agents (e.g., ropinirole, pramipexole, rotigotine), medroxyprogesterone, KCNQ2/KCNQ3 openers (e.g., retigabine, XEN1101, or QRL-101), bioactive scaffolds, anticonvulsants and psychostimulant agents, a therapy (e.g., selected from breathing care, physical therapy, occupational therapy, speech therapy, nutritional support), deep brain stimulation, levodopa and carbidopa (duopa, rytary, Sinemet, inbrija), istradefylline (nourianz), safinamide (xadago), pramipexole (Mirapex), rotigotine (neupro), ropinirole (requip), amantadine (gocovri, Symmetrel, osmolex), benztropine (Cogentin), trihexyphenidyl (artane), selegiline (eldepryl, zelapar), rasagiline, entacapone (comtan), opicapone (ongentys), tolcapone (tasmar), apomorphine (apokyn, kynmobi), exenatide, lingzhi, BIIB054, BIIB094, Caffeine, sarizotan, embryonic dopamine cell implantation, aducanamab (Aduhlem), memantine (Namenda), Donepezil (Aricept), Rivastigmine (Exelon), Galantamine (razadyne), Namzeric, Suvorexant (belsomra), lecanemab, olanzapine (Zyprexa), quetiapine (Seroquel), SSRIs (citalopram (Cipramil), dapoxetine (Priligy), escitalopram (Cipralex), fluoxetine (Prozac or Oxactin), fluvoxamine (Faverin), paroxetine (Seroxat), sertraline (Lustral), vortioxetine (Brintellix)), divalproex sodium (Depakote), carbamazepine (Tegretol), medroxyprogestrone, Brivaracetam (briviact), cannabidiol (epidiolex), carbamazepine (carbatrol, Tegretol), cenobamate (xcopri), diazepam (valium), lorazepam (Ativan), clonazepam (klonopin), eslicarbazepine (aptiom), ethosuximide (zarontin), felbamate (felbatol), fenfluramine (fintepla), lacosamide (VIMPAT), lamotrigine (Lamictal), levetiracetam (Keppra), oxcarbazepine (oxtellar xr, Trileptal), perampanel (fycompa), phenobarbital, phenytoin (dilantin), pregabalin (lyrica), tiagabine (gabitril), topiramate (topamax), valproate (depakene, depakote), and/or zonisamide (zonegran), for treating said neurologic disease.

167. A method of treating a neurological disease and/or a neuropathy in a patient in need thereof, the method comprising administering to a patient in need thereof a therapeutically effective amount of a pharmaceutical composition of claim 123 or 124, wherein at least one nucleoside linkage of the oligonucleotide is a non-natural linkage, optionally wherein the oligonucleotide comprises a spacer, and wherein the oligonucleotide further comprises a targeting or conjugate moiety selected from cholesterol, lipoic acid, panthothenic acid, polyethylene glycol, and an antibody for crossing the blood brain barrier.

168. The method of any one of claims 103-122, 125-161, or 163-167, wherein the spacer is a nucleoside-replacement group comprising a non-sugar substitute that is incapable of linking to a nucleotide base.

169. The method of claim 168, wherein the spacer is located between positions 10 and 15 of the oligonucleotide.

170. The method of claim 168, wherein the spacer is located between positions 7 and 11 of the oligonucleotide.

171. The method of claim 168 or 170, wherein the oligonucleotide further comprises a second spacer, wherein the second spacer is located between positions 14 and 22 of the oligonucleotide.

172. The method of claim 171, wherein the spacer and the second spacer are separated by at least 5 nucleobases, at least 6 nucleobases, or at least 7 nucleobases in the oligonucleotide.

173. The method of claim 171 or 172, wherein the spacer is located between positions 7 and 9 of the oligonucleotide, and wherein the second spacer is located between positions 15 and 18 of the oligonucleotide.

174. The method of any one of claims 171-173, wherein the spacer is located at position 8 of the oligonucleotide, and wherein the second spacer is located at position 16 of the oligonucleotide.

175. The method of any one of claims 171-174, wherein the oligonucleotide further comprises a third spacer, wherein the third spacer is located between positions 21 and 24 of the oligonucleotide.

176. The method of claim 168, wherein the spacer is located between positions 2 and 5 of the oligonucleotide.

177. The method of claim 176, wherein the oligonucleotide further comprises a second spacer, wherein the second spacer is located between positions 8 and 12 of the oligonucleotide.

178. The method of claim 177, wherein the oligonucleotide further comprises a third spacer, wherein the third spacer is located between positions 18 and 22 of the oligonucleotide.

179. The method of claim 168, wherein the oligonucleotide further comprises a second spacer and a third spacer, wherein the three spacers are located at positions in the oligonucleotide such that each segment of the oligonucleotide has at most 7 linked nucleosides.

180. The method of claim 179, wherein at least two of the three spacers are adjacent to a guanine nucleobase.

181. The method of claim 180, wherein each of the at least two of the three spacers immediately precede a guanine nucleobase.

182. The method of any one of claims 168-181, wherein each of the first, second or third spacers is a nucleoside-replacement group comprising a non-sugar substitute wherein the non-sugar substitute does not contain a ketone, aldehyde, ketal, hemiketal, acetal, hemiacetal, aminal or hemiaminal moiety and is incapable of forming a covalent bond with a nucleotide base.

183. The method of any one of claims 168-181, wherein each of the first, second or third spacers is independently represented by Formula (X), wherein: [chemical structure]
Ring A is an optionally substituted 4-8 member monocyclic cycloalkyl group or a 4-8 member monocyclic heterocyclyl group, wherein the heterocyclyl group contains 1 or 2 heteroatoms selected from O, S and N, provided that A is not capable of forming a covalent bond to a nucleobase; and
the [chemical structure]
symbol represents the point of connection to an internucleoside linkage.

184. The method of claim 183, wherein each of the first, second or third spacers is independently represented by Formula (Xa), wherein:

[chemical structure]

185. The method of claim 183 or 184, wherein ring A is an optionally substituted 4-8 member monocyclic cycloalkyl group selected from cyclobutyl, cyclopentyl, cyclohexyl, cycloheptyl and cyclooctyl; or a 4-8 member monocyclic heterocyclyl group, selected from oxetanyl, tetrahydrofuranyl, tetrahydropyranyl, 1,4-dioxanyl, pyrolidinyl, piperidinyl, piperazinyl, morpholinyl and azepanyl.

186. The method of claim 185, wherein ring A is tetrahydrofuranyl.

187. The method of claim 185, wherein ring A is tetrahydropyranyl.

188. The method of any one of claims 168-181 wherein each of the first, second or third spacers is independently represented by Formula (I), wherein: [chemical structure]
X is selected from —CH₂— and —O—; and
n is 0, 1, 2 or 3.

189. The method of any one of claims 168-181, wherein each of the first, second or third spacers is independently represented by Formula (I′), wherein:

[chemical structure]

190. The method of any one of claims 168-181, wherein each of the first, second or third spacers is independently represented by Formula (Ia), wherein:

[chemical structure]

191. The method of any one of claims 168-181, wherein each of the first, second or third spacers is independently represented by Formula (Ia′), wherein:

[chemical structure]

192. The method of any one of claims 168-181, wherein each of the first, second or third spacers is independently represented by Formula II, wherein: [chemical structure]
and
X is selected from —CH₂— and —O—.

193. The method of any one of claims 168-181, wherein each of the first, second or third spacers is independently represented by Formula II′, wherein: [chemical structure]
and
X is selected from —CH₂— and —O—.

194. The method of any one of claims 168-181, wherein each of the first, second or third spacers is independently represented by Formula (Iia), wherein:

[chemical structure]

195. The method of any one of claims 168-181, wherein each of the first, second or third spacers is independently represented by Formula (Iia′), wherein:

[chemical structure]

196. The method of any one of claims 168-181, wherein each of the first, second or third spacers is independently represented by Formula (IIi), wherein: [chemical structure]
X is selected from —CH₂— and —O—.

197. The method of any one of claims 168-181, wherein each of the first, second or third spacers is independently represented by Formula (IIi′), wherein: [chemical structure]
X is selected from —CH₂— and —O—.

198. The method of any one of claims 168-181, wherein each of the first, second or third spacers is independently represented by Formula (IIib), wherein:

[chemical structure]

199. The method of any one of claims 168-181, wherein each of the first, second or third spacers is independently represented by Formula (IIib′), wherein: [chemical structure]
The method of any one of claims 168-181, wherein each of the first, second or third spacers is independently represented by Formula III, wherein: [chemical structure]
and
X is selected from —CH₂— and —O—.

200. The method of any one of claims 168-181, wherein each of the first, second or third spacers is independently represented by Formula III′, wherein: [chemical structure]
and
X is selected from —CH₂— and —O—.

201. The method of any one of claims 168-181, wherein each of the first, second or third spacers is independently represented by Formula (IIIa), wherein:

[chemical structure]

202. The method of any one of claims 168-181, wherein each of the first, second or third spacers is independently represented by Formula (IIIa′), wherein:

[chemical structure]

203. The method of any one of claims 168-202, wherein the oligonucleotide comprising the spacer has a GC content of at least 10%.

204. The method of any one of claims 168-203, wherein the oligonucleotide comprising the spacer has a GC content of at least 20%.

205. The method of any one of claims 168-204, wherein the oligonucleotide comprising the spacer has a GC content of at least 25%.

206. The method of any one of claims 168-205, wherein the oligonucleotide comprising the spacer has a GC content of at least 30%.

207. The method of any one of claims 168-206, wherein the oligonucleotide comprising the spacer has a GC content of at least 40%.

208. The method of any one of claims 168-207, wherein the oligonucleotide comprising the spacer has a GC content of at least 50%.

209. The compound or oligonucleotide of any one of the above claims, wherein the oligonucleotide exhibits at least a 30%, 40%, 50%, 60%, 70%, 80%, or 90% reduction of an UNC13A transcript with a cryptic exon.

210. The compound or oligonucleotide of any one of the above claims, wherein the oligonucleotide exhibits at least a 100% reduction of an UNC13A transcript with a cryptic exon.

211. The compound or oligonucleotide of any one of claims 200-201, wherein reduction of an UNC13A transcript with a cryptic exon is measured in comparison to a level of UNC13A transcript with a cryptic exon detected using a TDP43 antisense oligonucleotide.

212. The compound or oligonucleotide of any one of the above claims, wherein the oligonucleotide exhibits at least a 10%, 20%, 30%, 40%, 50%, 60%, 70%, 80%, 90%, or 100% reduction of an UNC13A transcript with a cryptic exon.

The application's sequence listing, which the Patent Office published only in electronic form, follows.

SEQUENCE LISTING (5589 sequences)

SEQ ID NO: 1 - DNA, 25 bp, synthetic construct
  source 1..25: mol_type = other DNA
ggaggggccgagcaatgaccctcac

SEQ ID NO: 2 - DNA, 25 bp, synthetic construct
  source 1..25: mol_type = other DNA
gggaggggccgagcaatgaccctca

SEQ ID NO: 3 - DNA, 25 bp, synthetic construct
  source 1..25: mol_type = other DNA
tgggaggggccgagcaatgaccctc

SEQ ID NO: 4 - DNA, 25 bp, synthetic construct
  source 1..25: mol_type = other DNA
atgggaggggccgagcaatgaccct

SEQ ID NO: 5 - DNA, 25 bp, synthetic construct
  source 1..25: mol_type = other DNA
catgggaggggccgagcaatgaccc

SEQ ID NO: 6 - DNA, 25 bp, synthetic construct
  source 1..25: mol_type = other DNA
gcatgggaggggccgagcaatgacc

SEQ ID NO: 7 - DNA, 25 bp, synthetic construct
  source 1..25: mol_type = other DNA
ggcatgggaggggccgagcaatgac

SEQ ID NO: 8 - DNA, 25 bp, synthetic construct
  source 1..25: mol_type = other DNA
tggcatgggaggggccgagcaatga

SEQ ID NO: 9 - DNA, 25 bp, synthetic construct
  source 1..25: mol_type = other DNA
gtggcatgggaggggccgagcaatg

SEQ ID NO: 10 - DNA, 25 bp, synthetic construct
  source 1..25: mol_type = other DNA
agtggcatgggaggggccgagcaat

SEQ ID NO: 11 - DNA, 25 bp, synthetic construct
  source 1..25: mol_type = other DNA
aagtggcatgggaggggccgagcaa

SEQ ID NO: 12 - DNA, 25 bp, synthetic construct
  source 1..25: mol_type = other DNA
gaagtggcatgggaggggccgagca

SEQ ID NO: 13 - DNA, 25 bp, synthetic construct
  source 1..25: mol_type = other DNA
ggaagtggcatgggaggggccgagc

SEQ ID NO: 14 - DNA, 25 bp, synthetic construct
  source 1..25: mol_type = other DNA
tggaagtggcatgggaggggccgag

SEQ ID NO: 15 - DNA, 25 bp, synthetic construct
  source 1..25: mol_type = other DNA
gtggaagtggcatgggaggggccga

SEQ ID NO: 16 - DNA, 25 bp, synthetic construct
  source 1..25: mol_type = other DNA
agtggaagtggcatgggaggggccg

SEQ ID NO: 17 - DNA, 25 bp, synthetic construct
  source 1..25: mol_type = other DNA
gagtggaagtggcatgggaggggcc

SEQ ID NO: 18 - DNA, 25 bp, synthetic construct
  source 1..25: mol_type = other DNA
tgagtggaagtggcatgggaggggc

SEQ ID NO: 19 - DNA, 25 bp, synthetic construct
  source 1..25: mol_type = other DNA
gtgagtggaagtggcatgggagggg

SEQ ID NO: 20 - DNA, 25 bp, synthetic construct
  source 1..25: mol_type = other DNA
ggtgagtggaagtggcatgggaggg

SEQ ID NO: 21 - DNA, 25 bp, synthetic construct
  source 1..25: mol_type = other DNA
tggtgagtggaagtggcatgggagg

SEQ ID NO: 22 - DNA, 25 bp, synthetic construct
  source 1..25: mol_type = other DNA
atggtgagtggaagtggcatgggag

SEQ ID NO: 23 - DNA, 25 bp, synthetic construct
  source 1..25: mol_type = other DNA
aatggtgagtggaagtggcatggga

SEQ ID NO: 24 - DNA, 25 bp, synthetic construct
  source 1..25: mol_type = other DNA
gaatggtgagtggaagtggcatggg

SEQ ID NO: 25 - DNA, 25 bp, synthetic construct
  source 1..25: mol_type = other DNA
ggaatggtgagtggaagtggcatgg

SEQ ID NO: 26 - DNA, 25 bp, synthetic construct
  source 1..25: mol_type = other DNA
aggaatggtgagtggaagtggcatg

SEQ ID NO: 27 - DNA, 25 bp, synthetic construct
  source 1..25: mol_type = other DNA
caggaatggtgagtggaagtggcat

SEQ ID NO: 28 - DNA, 25 bp, synthetic construct
  source 1..25: mol_type = other DNA
gcaggaatggtgagtggaagtggca

SEQ ID NO: 29 - DNA, 25 bp, synthetic construct
  source 1..25: mol_type = other DNA
ggcaggaatggtgagtggaagtggc

SEQ ID NO: 30 - DNA, 25 bp, synthetic construct
  source 1..25: mol_type = other DNA
aggcaggaatggtgagtggaagtgg

SEQ ID NO: 31 - DNA, 25 bp, synthetic construct
  source 1..25: mol_type = other DNA
caggcaggaatggtgagtggaagtg

SEQ ID NO: 32 - DNA, 25 bp, synthetic construct
  source 1..25: mol_type = other DNA
gcaggcaggaatggtgagtggaagt

SEQ ID NO: 33 - DNA, 25 bp, synthetic construct
  source 1..25: mol_type = other DNA
ggcaggcaggaatggtgagtggaag

SEQ ID NO: 34 - DNA, 25 bp, synthetic construct
  source 1..25: mol_type = other DNA
gggcaggcaggaatggtgagtggaa

SEQ ID NO: 35 - DNA, 25 bp, synthetic construct
  source 1..25: mol_type = other DNA
tgggcaggcaggaatggtgagtgga

SEQ ID NO: 36 - DNA, 25 bp, synthetic construct
  source 1..25: mol_type = other DNA
ctgggcaggcaggaatggtgagtgg

SEQ ID NO: 37 - DNA, 25 bp, synthetic construct
  source 1..25: mol_type = other DNA
gctgggcaggcaggaatggtgagtg

SEQ ID NO: 38 - DNA, 25 bp, synthetic construct
  source 1..25: mol_type = other DNA
agctgggcaggcaggaatggtgagt

SEQ ID NO: 39 - DNA, 25 bp, synthetic construct
  source 1..25: mol_type = other DNA
gagctgggcaggcaggaatggtgag

SEQ ID NO: 40 - DNA, 25 bp, synthetic construct
  source 1..25: mol_type = other DNA
agagctgggcaggcaggaatggtga

SEQ ID NO: 41 - DNA, 25 bp, synthetic construct
  source 1..25: mol_type = other DNA
aagagctgggcaggcaggaatggtg

SEQ ID NO: 42 - DNA, 25 bp, synthetic construct
  source 1..25: mol_type = other DNA
gaagagctgggcaggcaggaatggt

SEQ ID NO: 43 - DNA, 25 bp, synthetic construct
  source 1..25: mol_type = other DNA
ggaagagctgggcaggcaggaatgg

SEQ ID NO: 44 - DNA, 25 bp, synthetic construct
  source 1..25: mol_type = other DNA
aggaagagctgggcaggcaggaatg

SEQ ID NO: 45 - DNA, 25 bp, synthetic construct
  source 1..25: mol_type = other DNA
gaggaagagctgggcaggcaggaat

SEQ ID NO: 46 - DNA, 25 bp, synthetic construct
  source 1..25: mol_type = other DNA
agaggaagagctgggcaggcaggaa

SEQ ID NO: 47 - DNA, 25 bp, synthetic construct
  source 1..25: mol_type = other DNA
aagaggaagagctgggcaggcagga

SEQ ID NO: 48 - DNA, 25 bp, synthetic construct
  source 1..25: mol_type = other DNA
aaagaggaagagctgggcaggcagg

SEQ ID NO: 49 - DNA, 25 bp, synthetic construct
  source 1..25: mol_type = other DNA
gaaagaggaagagctgggcaggcag

SEQ ID NO: 50 - DNA, 25 bp, synthetic construct
  source 1..25: mol_type = other DNA
agaaagaggaagagctgggcaggca

SEQ ID NO: 51 - DNA, 25 bp, synthetic construct
  source 1..25: mol_type = other DNA
cagaaagaggaagagctgggcaggc

SEQ ID NO: 52 - DNA, 25 bp, synthetic construct
  source 1..25: mol_type = other DNA
ccagaaagaggaagagctgggcagg

SEQ ID NO: 53 - DNA, 25 bp, synthetic construct
  source 1..25: mol_type = other DNA
gccagaaagaggaagagctgggcag

SEQ ID NO: 54 - DNA, 25 bp, synthetic construct
  source 1..25: mol_type = other DNA
ggccagaaagaggaagagctgggca

SEQ ID NO: 55 - DNA, 25 bp, synthetic construct
  source 1..25: mol_type = other DNA
tggccagaaagaggaagagctgggc

SEQ ID NO: 56 - DNA, 25 bp, synthetic construct
  source 1..25: mol_type = other DNA
gtggccagaaagaggaagagctggg

SEQ ID NO: 57 - DNA, 25 bp, synthetic construct
  source 1..25: mol_type = other DNA
tgtggccagaaagaggaagagctgg

SEQ ID NO: 58 - DNA, 25 bp, synthetic construct
  source 1..25: mol_type = other DNA
gtgtggccagaaagaggaagagctg

SEQ ID NO: 59 - DNA, 25 bp, synthetic construct
  source 1..25: mol_type = other DNA
ggtgtggccagaaagaggaagagct

SEQ ID NO: 60 - DNA, 25 bp, synthetic construct
  source 1..25: mol_type = other DNA
tggtgtggccagaaagaggaagagc

SEQ ID NO: 61 - DNA, 25 bp, synthetic construct
  source 1..25: mol_type = other DNA
atggtgtggccagaaagaggaagag

SEQ ID NO: 62 - DNA, 25 bp, synthetic construct
  source 1..25: mol_type = other DNA
gatggtgtggccagaaagaggaaga

SEQ ID NO: 63 - DNA, 25 bp, synthetic construct
  source 1..25: mol_type = other DNA
ggatggtgtggccagaaagaggaag

SEQ ID NO: 64 - DNA, 25 bp, synthetic construct
  source 1..25: mol_type = other DNA
tggatggtgtggccagaaagaggaa

SEQ ID NO: 65 - DNA, 25 bp, synthetic construct
  source 1..25: mol_type = other DNA
gtggatggtgtggccagaaagagga

SEQ ID NO: 66 - DNA, 25 bp, synthetic construct
  source 1..25: mol_type = other DNA
tgtggatggtgtggccagaaagagg

SEQ ID NO: 67 - DNA, 25 bp, synthetic construct
  source 1..25: mol_type = other DNA
gtgtggatggtgtggccagaaagag

SEQ ID NO: 68 - DNA, 25 bp, synthetic construct
  source 1..25: mol_type = other DNA
agtgtggatggtgtggccagaaaga

SEQ ID NO: 69 - DNA, 25 bp, synthetic construct
  source 1..25: mol_type = other DNA
gagtgtggatggtgtggccagaaag

SEQ ID NO: 70 - DNA, 25 bp, synthetic construct
  source 1..25: mol_type = other DNA
agagtgtggatggtgtggccagaaa

SEQ ID NO: 71 - DNA, 25 bp, synthetic construct
  source 1..25: mol_type = other DNA
gagagtgtggatggtgtggccagaa

SEQ ID NO: 72 - DNA, 25 bp, synthetic construct
  source 1..25: mol_type = other DNA
ggagagtgtggatggtgtggccaga

SEQ ID NO: 73 - DNA, 25 bp, synthetic construct
  source 1..25: mol_type = other DNA
aggagagtgtggatggtgtggccag

SEQ ID NO: 74 - DNA, 25 bp, synthetic construct
  source 1..25: mol_type = other DNA
caggagagtgtggatggtgtggcca

SEQ ID NO: 75 - DNA, 25 bp, synthetic construct
  source 1..25: mol_type = other DNA
ccaggagagtgtggatggtgtggcc

SEQ ID NO: 76 - DNA, 25 bp, synthetic construct
  source 1..25: mol_type = other DNA
gccaggagagtgtggatggtgtggc

SEQ ID NO: 77 - DNA, 25 bp, synthetic construct
  source 1..25: mol_type = other DNA
ggccaggagagtgtggatggtgtgg

SEQ ID NO: 78 - DNA, 25 bp, synthetic construct
  source 1..25: mol_type = other DNA
gggccaggagagtgtggatggtgtg

SEQ ID NO: 79 - DNA, 25 bp, synthetic construct
  source 1..25: mol_type = other DNA
agggccaggagagtgtggatggtgt

SEQ ID NO: 80 - DNA, 25 bp, synthetic construct
  source 1..25: mol_type = other DNA
gagggccaggagagtgtggatggtg

SEQ ID NO: 81 - DNA, 25 bp, synthetic construct
  source 1..25: mol_type = other DNA
agagggccaggagagtgtggatggt

SEQ ID NO: 82 - DNA, 25 bp, synthetic construct
  source 1..25: mol_type = other DNA
cagagggccaggagagtgtggatgg

SEQ ID NO: 83 - DNA, 25 bp, synthetic construct
  source 1..25: mol_type = other DNA
tcagagggccaggagagtgtggatg

SEQ ID NO: 84 - DNA, 25 bp, synthetic construct
  source 1..25: mol_type = other DNA
ctcagagggccaggagagtgtggat

SEQ ID NO: 85 - DNA, 25 bp, synthetic construct
  source 1..25: mol_type = other DNA
tctcagagggccaggagagtgtgga

SEQ ID NO: 86 - DNA, 25 bp, synthetic construct
  source 1..25: mol_type = other DNA
gtctcagagggccaggagagtgtgg

SEQ ID NO: 87 - DNA, 25 bp, synthetic construct
  source 1..25: mol_type = other DNA
agtctcagagggccaggagagtgtg

SEQ ID NO: 88 - DNA, 25 bp, synthetic construct
  source 1..25: mol_type = other DNA
cagtctcagagggccaggagagtgt

SEQ ID NO: 89 - DNA, 25 bp, synthetic construct
  source 1..25: mol_type = other DNA
gcagtctcagagggccaggagagtg

SEQ ID NO: 90 - DNA, 25 bp, synthetic construct
  source 1..25: mol_type = other DNA
ggcagtctcagagggccaggagagt

SEQ ID NO: 91 - DNA, 25 bp, synthetic construct
  source 1..25: mol_type = other DNA
gggcagtctcagagggccaggagag

SEQ ID NO: 92 - DNA, 25 bp, synthetic construct
  source 1..25: mol_type = other DNA
cgggcagtctcagagggccaggaga

SEQ ID NO: 93 - DNA, 25 bp, synthetic construct
  source 1..25: mol_type = other DNA
gcgggcagtctcagagggccaggag

SEQ ID NO: 94 - DNA, 25 bp, synthetic construct
  source 1..25: mol_type = other DNA
ggcgggcagtctcagagggccagga

SEQ ID NO: 95 - DNA, 25 bp, synthetic construct
  source 1..25: mol_type = other DNA
tggcgggcagtctcagagggccagg

SEQ ID NO: 96 - DNA, 25 bp, synthetic construct
  source 1..25: mol_type = other DNA
atggcgggcagtctcagagggccag

SEQ ID NO: 97 - DNA, 25 bp, synthetic construct
  source 1..25: mol_type = other DNA
catggcgggcagtctcagagggcca

SEQ ID NO: 98 - DNA, 25 bp, synthetic construct
  source 1..25: mol_type = other DNA
gcatggcgggcagtctcagagggcc

SEQ ID NO: 99 - DNA, 25 bp, synthetic construct
  source 1..25: mol_type = other DNA
ggcatggcgggcagtctcagagggc

SEQ ID NO: 100 - DNA, 25 bp, synthetic construct
  source 1..25: mol_type = other DNA
tggcatggcgggcagtctcagaggg

SEQ ID NO: 101 - DNA, 25 bp, synthetic construct
  source 1..25: mol_type = other DNA
atggcatggcgggcagtctcagagg

SEQ ID NO: 102 - DNA, 25 bp, synthetic construct
  source 1..25: mol_type = other DNA
aatggcatggcgggcagtctcagag

SEQ ID NO: 103 - DNA, 25 bp, synthetic construct
  source 1..25: mol_type = other DNA
gaatggcatggcgggcagtctcaga

SEQ ID NO: 104 - DNA, 25 bp, synthetic construct
  source 1..25: mol_type = other DNA
ggaatggcatggcgggcagtctcag

SEQ ID NO: 105 - DNA, 25 bp, synthetic construct
  source 1..25: mol_type = other DNA
gggaatggcatggcgggcagtctca

SEQ ID NO: 106 - DNA, 25 bp, synthetic construct
  source 1..25: mol_type = other DNA
agggaatggcatggcgggcagtctc

SEQ ID NO: 107 - DNA, 25 bp, synthetic construct
  source 1..25: mol_type = other DNA
aagggaatggcatggcgggcagtct

SEQ ID NO: 108 - DNA, 25 bp, synthetic construct
  source 1..25: mol_type = other DNA
aaagggaatggcatggcgggcagtc

SEQ ID NO: 109 - DNA, 25 bp, synthetic construct
  source 1..25: mol_type = other DNA
taaagggaatggcatggcgggcagt

SEQ ID NO: 110 - DNA, 25 bp, synthetic construct
  source 1..25: mol_type = other DNA
gtaaagggaatggcatggcgggcag

SEQ ID NO: 111 - DNA, 25 bp, synthetic construct
  source 1..25: mol_type = other DNA
ggtaaagggaatggcatggcgggca

SEQ ID NO: 112 - DNA, 25 bp, synthetic construct
  source 1..25: mol_type = other DNA
aggtaaagggaatggcatggcgggc

SEQ ID NO: 113 - DNA, 25 bp, synthetic construct
  source 1..25: mol_type = other DNA
caggtaaagggaatggcatggcggg

SEQ ID NO: 114 - DNA, 25 bp, synthetic construct
  source 1..25: mol_type = other DNA
ccaggtaaagggaatggcatggcgg

SEQ ID NO: 115 - DNA, 25 bp, synthetic construct
  source 1..25: mol_type = other DNA
tccaggtaaagggaatggcatggcg

SEQ ID NO: 116 - DNA, 25 bp, synthetic construct
  source 1..25: mol_type = other DNA
ttccaggtaaagggaatggcatggc

SEQ ID NO: 117 - DNA, 25 bp, synthetic construct
  source 1..25: mol_type = other DNA
tttccaggtaaagggaatggcatgg

SEQ ID NO: 118 - DNA, 25 bp, synthetic construct
  source 1..25: mol_type = other DNA
ttttccaggtaaagggaatggcatg

SEQ ID NO: 119 - DNA, 25 bp, synthetic construct
  source 1..25: mol_type = other DNA
gttttccaggtaaagggaatggcat

SEQ ID NO: 120 - DNA, 25 bp, synthetic construct
  source 1..25: mol_type = other DNA
agttttccaggtaaagggaatggca

SEQ ID NO: 121 - DNA, 25 bp, synthetic construct
  source 1..25: mol_type = other DNA
gagttttccaggtaaagggaatggc

SEQ ID NO: 122 - DNA, 25 bp, synthetic construct
  source 1..25: mol_type = other DNA
ggagttttccaggtaaagggaatgg

SEQ ID NO: 123 - DNA, 25 bp, synthetic construct
  source 1..25: mol_type = other DNA
aggagttttccaggtaaagggaatg

SEQ ID NO: 124 - DNA, 25 bp, synthetic construct
  source 1..25: mol_type = other DNA
gaggagttttccaggtaaagggaat

SEQ ID NO: 125 - DNA, 25 bp, synthetic construct
  source 1..25: mol_type = other DNA
ggaggagttttccaggtaaagggaa

SEQ ID NO: 126 - DNA, 25 bp, synthetic construct
  source 1..25: mol_type = other DNA
gggaggagttttccaggtaaaggga

SEQ ID NO: 127 - DNA, 25 bp, synthetic construct
  source 1..25: mol_type = other DNA
agggaggagttttccaggtaaaggg

SEQ ID NO: 128 - DNA, 25 bp, synthetic construct
  source 1..25: mol_type = other DNA
tagggaggagttttccaggtaaagg

SEQ ID NO: 129 - DNA, 25 bp, synthetic construct
  source 1..25: mol_type = other DNA
atagggaggagttttccaggtaaag

SEQ ID NO: 130 - DNA, 25 bp, synthetic construct
  source 1..25: mol_type = other DNA
gatagggaggagttttccaggtaaa

SEQ ID NO: 131 - DNA, 25 bp, synthetic construct
  source 1..25: mol_type = other DNA
ggatagggaggagttttccaggtaa

SEQ ID NO: 132 - DNA, 25 bp, synthetic construct
  source 1..25: mol_type = other DNA
tggatagggaggagttttccaggta

SEQ ID NO: 133 - DNA, 25 bp, synthetic construct
  source 1..25: mol_type = other DNA
atggatagggaggagttttccaggt

SEQ ID NO: 134 - DNA, 25 bp, synthetic construct
  source 1..25: mol_type = other DNA
gatggatagggaggagttttccagg

SEQ ID NO: 135 - DNA, 25 bp, synthetic construct
  source 1..25: mol_type = other DNA
tgatggatagggaggagttttccag

SEQ ID NO: 136 - DNA, 25 bp, synthetic construct
  source 1..25: mol_type = other DNA
ttgatggatagggaggagttttcca

SEQ ID NO: 137 - DNA, 25 bp, synthetic construct
  source 1..25: mol_type = other DNA
tttgatggatagggaggagttttcc

SEQ ID NO: 138 - DNA, 25 bp, synthetic construct
  source 1..25: mol_type = other DNA
ctttgatggatagggaggagttttc

SEQ ID NO: 139 - DNA, 25 bp, synthetic construct
  source 1..25: mol_type = other DNA
actttgatggatagggaggagtttt

SEQ ID NO: 140 - DNA, 25 bp, synthetic construct
  source 1..25: mol_type = other DNA
gactttgatggatagggaggagttt

SEQ ID NO: 141 - DNA, 25 bp, synthetic construct
  source 1..25: mol_type = other DNA
ggactttgatggatagggaggagtt

SEQ ID NO: 142 - DNA, 25 bp, synthetic construct
  source 1..25: mol_type = other DNA
tggactttgatggatagggaggagt

SEQ ID NO: 143 - DNA, 25 bp, synthetic construct
  source 1..25: mol_type = other DNA
ctggactttgatggatagggaggag

SEQ ID NO: 144 - DNA, 25 bp, synthetic construct
  source 1..25: mol_type = other DNA
tctggactttgatggatagggagga

SEQ ID NO: 145 - DNA, 25 bp, synthetic construct
  source 1..25: mol_type = other DNA
atctggactttgatggatagggagg

SEQ ID NO: 146 - DNA, 25 bp, synthetic construct
  source 1..25: mol_type = other DNA
aatctggactttgatggatagggag

SEQ ID NO: 147 - DNA, 25 bp, synthetic construct
  source 1..25: mol_type = other DNA
gaatctggactttgatggataggga

SEQ ID NO: 148 - DNA, 25 bp, synthetic construct
  source 1..25: mol_type = other DNA
tgaatctggactttgatggataggg

SEQ ID NO: 149 - DNA, 25 bp, synthetic construct
  source 1..25: mol_type = other DNA
ctgaatctggactttgatggatagg

SEQ ID NO: 150 - DNA, 25 bp, synthetic construct
  source 1..25: mol_type = other DNA
cctgaatctggactttgatggatag

SEQ ID NO: 151 - DNA, 25 bp, synthetic construct
  source 1..25: mol_type = other DNA
ccctgaatctggactttgatggata

SEQ ID NO: 152 - DNA, 25 bp, synthetic construct
  source 1..25: mol_type = other DNA
accctgaatctggactttgatggat

SEQ ID NO: 153 - DNA, 25 bp, synthetic construct
  source 1..25: mol_type = other DNA
gaccctgaatctggactttgatgga

SEQ ID NO: 154 - DNA, 25 bp, synthetic construct
  source 1..25: mol_type = other DNA
tgaccctgaatctggactttgatgg

SEQ ID NO: 155 - DNA, 25 bp, synthetic construct
  source 1..25: mol_type = other DNA
gtgaccctgaatctggactttgatg

SEQ ID NO: 156 - DNA, 25 bp, synthetic construct
  source 1..25: mol_type = other DNA
ggtgaccctgaatctggactttgat

SEQ ID NO: 157 - DNA, 25 bp, synthetic construct
  source 1..25: mol_type = other DNA
aggtgaccctgaatctggactttga

SEQ ID NO: 158 - DNA, 25 bp, synthetic construct
  source 1..25: mol_type = other DNA
gaggtgaccctgaatctggactttg

SEQ ID NO: 159 - DNA, 25 bp, synthetic construct
  source 1..25: mol_type = other DNA
ggaggtgaccctgaatctggacttt

SEQ ID NO: 160 - DNA, 25 bp, synthetic construct
  source 1..25: mol_type = other DNA
aggaggtgaccctgaatctggactt

SEQ ID NO: 161 - DNA, 25 bp, synthetic construct
  source 1..25: mol_type = other DNA
gaggaggtgaccctgaatctggact

SEQ ID NO: 162 - DNA, 25 bp, synthetic construct
  source 1..25: mol_type = other DNA
agaggaggtgaccctgaatctggac

SEQ ID NO: 163 - DNA, 25 bp, synthetic construct
  source 1..25: mol_type = other DNA
cagaggaggtgaccctgaatctgga

SEQ ID NO: 164 - DNA, 25 bp, synthetic construct
  source 1..25: mol_type = other DNA
ccagaggaggtgaccctgaatctgg

SEQ ID NO: 165 - DNA, 25 bp, synthetic construct
  source 1..25: mol_type = other DNA
cccagaggaggtgaccctgaatctg

SEQ ID NO: 166 - DNA, 25 bp, synthetic construct
  source 1..25: mol_type = other DNA
tcccagaggaggtgaccctgaatct

SEQ ID NO: 167 - DNA, 25 bp, synthetic construct
  source 1..25: mol_type = other DNA
ttcccagaggaggtgaccctgaatc

SEQ ID NO: 168 - DNA, 25 bp, synthetic construct
  source 1..25: mol_type = other DNA
cttcccagaggaggtgaccctgaat

SEQ ID NO: 169 - DNA, 25 bp, synthetic construct
  source 1..25: mol_type = other DNA
gcttcccagaggaggtgaccctgaa

SEQ ID NO: 170 - DNA, 25 bp, synthetic construct
  source 1..25: mol_type = other DNA
ggcttcccagaggaggtgaccctga

SEQ ID NO: 171 - DNA, 25 bp, synthetic construct
  source 1..25: mol_type = other DNA
gggcttcccagaggaggtgaccctg

SEQ ID NO: 172 - DNA, 25 bp, synthetic construct
  source 1..25: mol_type = other DNA
tgggcttcccagaggaggtgaccct

SEQ ID NO: 173 - DNA, 25 bp, synthetic construct
  source 1..25: mol_type = other DNA
gtgggcttcccagaggaggtgaccc

SEQ ID NO: 174 - DNA, 25 bp, synthetic construct
  source 1..25: mol_type = other DNA
ggtgggcttcccagaggaggtgacc

SEQ ID NO: 175 - DNA, 25 bp, synthetic construct
  source 1..25: mol_type = other DNA
aggtgggcttcccagaggaggtgac

SEQ ID NO: 176 - DNA, 25 bp, synthetic construct
  source 1..25: mol_type = other DNA
aaggtgggcttcccagaggaggtga

SEQ ID NO: 177 - DNA, 25 bp, synthetic construct
  source 1..25: mol_type = other DNA
caaggtgggcttcccagaggaggtg

SEQ ID NO: 178 - DNA, 25 bp, synthetic construct
  source 1..25: mol_type = other DNA
ccaaggtgggcttcccagaggaggt

SEQ ID NO: 179 - DNA, 25 bp, synthetic construct
  source 1..25: mol_type = other DNA
gccaaggtgggcttcccagaggagg

SEQ ID NO: 180 - DNA, 25 bp, synthetic construct
  source 1..25: mol_type = other DNA
ggccaaggtgggcttcccagaggag

SEQ ID NO: 181 - DNA, 25 bp, synthetic construct
  source 1..25: mol_type = other DNA
aggccaaggtgggcttcccagagga

SEQ ID NO: 182 - DNA, 25 bp, synthetic construct
  source 1..25: mol_type = other DNA
gaggccaaggtgggcttcccagagg

SEQ ID NO: 183 - DNA, 25 bp, synthetic construct
  source 1..25: mol_type = other DNA
ggaggccaaggtgggcttcccagag

SEQ ID NO: 184 - DNA, 25 bp, synthetic construct
  source 1..25: mol_type = other DNA
tggaggccaaggtgggcttcccaga

SEQ ID NO: 185 - DNA, 25 bp, synthetic construct
  source 1..25: mol_type = other DNA
ctggaggccaaggtgggcttcccag

SEQ ID NO: 186 - DNA, 25 bp, synthetic construct
  source 1..25: mol_type = other DNA
cctggaggccaaggtgggcttccca

SEQ ID NO: 187 - DNA, 25 bp, synthetic construct
  source 1..25: mol_type = other DNA
acctggaggccaaggtgggcttccc

SEQ ID NO: 188 - DNA, 25 bp, synthetic construct
  source 1..25: mol_type = other DNA
aacctggaggccaaggtgggcttcc

SEQ ID NO: 189 - DNA, 25 bp, synthetic construct
  source 1..25: mol_type = other DNA
caacctggaggccaaggtgggcttc

SEQ ID NO: 190 - DNA, 25 bp, synthetic construct
  source 1..25: mol_type = other DNA
tcaacctggaggccaaggtgggctt

SEQ ID NO: 191 - DNA, 25 bp, synthetic construct
  source 1..25: mol_type = other DNA
gtcaacctggaggccaaggtgggct

SEQ ID NO: 192 - DNA, 25 bp, synthetic construct
  source 1..25: mol_type = other DNA
agtcaacctggaggccaaggtgggc

SEQ ID NO: 193 - DNA, 25 bp, synthetic construct
  source 1..25: mol_type = other DNA
gagtcaacctggaggccaaggtggg

SEQ ID NO: 194 - DNA, 25 bp, synthetic construct
  source 1..25: mol_type = other DNA
agagtcaacctggaggccaaggtgg

SEQ ID NO: 195 - DNA, 25 bp, synthetic construct
  source 1..25: mol_type = other DNA
gagagtcaacctggaggccaaggtg

SEQ ID NO: 196 - DNA, 25 bp, synthetic construct
  source 1..25: mol_type = other DNA
tgagagtcaacctggaggccaaggt

SEQ ID NO: 197 - DNA, 25 bp, synthetic construct
  source 1..25: mol_type = other DNA
gtgagagtcaacctggaggccaagg

SEQ ID NO: 198 - DNA, 25 bp, synthetic construct
  source 1..25: mol_type = other DNA
agtgagagtcaacctggaggccaag

SEQ ID NO: 199 - DNA, 25 bp, synthetic construct
  source 1..25: mol_type = other DNA
tagtgagagtcaacctggaggccaa

SEQ ID NO: 200 - DNA, 25 bp, synthetic construct
  source 1..25: mol_type = other DNA
gtagtgagagtcaacctggaggcca

SEQ ID NO: 201 - DNA, 25 bp, synthetic construct
  source 1..25: mol_type = other DNA
agtagtgagagtcaacctggaggcc

SEQ ID NO: 202 - DNA, 25 bp, synthetic construct
  source 1..25: mol_type = other DNA
gagtagtgagagtcaacctggaggc

SEQ ID NO: 203 - DNA, 25 bp, synthetic construct
  source 1..25: mol_type = other DNA
tgagtagtgagagtcaacctggagg

SEQ ID NO: 204 - DNA, 25 bp, synthetic construct
  source 1..25: mol_type = other DNA
atgagtagtgagagtcaacctggag

SEQ ID NO: 205 - DNA, 25 bp, synthetic construct
  source 1..25: mol_type = other DNA
gatgagtagtgagagtcaacctgga

SEQ ID NO: 206 - DNA, 25 bp, synthetic construct
  source 1..25: mol_type = other DNA
tgatgagtagtgagagtcaacctgg

SEQ ID NO: 207 - DNA, 25 bp, synthetic construct
  source 1..25: mol_type = other DNA
atgatgagtagtgagagtcaacctg

SEQ ID NO: 208 - DNA, 25 bp, synthetic construct
  source 1..25: mol_type = other DNA
gatgatgagtagtgagagtcaacct

SEQ ID NO: 209 - DNA, 25 bp, synthetic construct
  source 1..25: mol_type = other DNA
tgatgatgagtagtgagagtcaacc

SEQ ID NO: 210 - DNA, 25 bp, synthetic construct
  source 1..25: mol_type = other DNA
ctgatgatgagtagtgagagtcaac

SEQ ID NO: 211 - DNA, 25 bp, synthetic construct
  source 1..25: mol_type = other DNA
cctgatgatgagtagtgagagtcaa

SEQ ID NO: 212 - DNA, 25 bp, synthetic construct
  source 1..25: mol_type = other DNA
acctgatgatgagtagtgagagtca

SEQ ID NO: 213 - DNA, 25 bp, synthetic construct
  source 1..25: mol_type = other DNA
aacctgatgatgagtagtgagagtc

SEQ ID NO: 214 - DNA, 25 bp, synthetic construct
  source 1..25: mol_type = other DNA
gaacctgatgatgagtagtgagagt

SEQ ID NO: 215 - DNA, 25 bp, synthetic construct
  source 1..25: mol_type = other DNA
agaacctgatgatgagtagtgagag

SEQ ID NO: 216 - DNA, 25 bp, synthetic construct
  source 1..25: mol_type = other DNA
aagaacctgatgatgagtagtgaga

SEQ ID NO: 217 - DNA, 25 bp, synthetic construct
  source 1..25: mol_type = other DNA
gaagaacctgatgatgagtagtgag

SEQ ID NO: 218 - DNA, 25 bp, synthetic construct
  source 1..25: mol_type = other DNA
ggaagaacctgatgatgagtagtga

SEQ ID NO: 219 - DNA, 25 bp, synthetic construct
  source 1..25: mol_type = other DNA
aggaagaacctgatgatgagtagtg

SEQ ID NO: 220 - DNA, 25 bp, synthetic construct
  source 1..25: mol_type = other DNA
aaggaagaacctgatgatgagtagt

SEQ ID NO: 221 - DNA, 25 bp, synthetic construct
  source 1..25: mol_type = other DNA
gaaggaagaacctgatgatgagtag

SEQ ID NO: 222 - DNA, 25 bp, synthetic construct
  source 1..25: mol_type = other DNA
agaaggaagaacctgatgatgagta

SEQ ID NO: 223 - DNA, 25 bp, synthetic construct
  source 1..25: mol_type = other DNA
tagaaggaagaacctgatgatgagt

SEQ ID NO: 224 - DNA, 25 bp, synthetic construct
  source 1..25: mol_type = other DNA
atagaaggaagaacctgatgatgag

SEQ ID NO: 225 - DNA, 25 bp, synthetic construct
  source 1..25: mol_type = other DNA
aatagaaggaagaacctgatgatga

SEQ ID NO: 226 - DNA, 25 bp, synthetic construct
  source 1..25: mol_type = other DNA
gaatagaaggaagaacctgatgatg

SEQ ID NO: 227 - DNA, 25 bp, synthetic construct
  source 1..25: mol_type = other DNA
ggaatagaaggaagaacctgatgat

SEQ ID NO: 228 - DNA, 25 bp, synthetic construct
  source 1..25: mol_type = other DNA
tggaatagaaggaagaacctgatga

SEQ ID NO: 229 - DNA, 25 bp, synthetic construct
  source 1..25: mol_type = other DNA
ctggaatagaaggaagaacctgatg

SEQ ID NO: 230 - DNA, 25 bp, synthetic construct
  source 1..25: mol_type = other DNA
gctggaatagaaggaagaacctgat

SEQ ID NO: 231 - DNA, 25 bp, synthetic construct
  source 1..25: mol_type = other DNA
ggctggaatagaaggaagaacctga

SEQ ID NO: 232 - DNA, 25 bp, synthetic construct
  source 1..25: mol_type = other DNA
gggctggaatagaaggaagaacctg

SEQ ID NO: 233 - DNA, 25 bp, synthetic construct
  source 1..25: mol_type = other DNA
agggctggaatagaaggaagaacct

SEQ ID NO: 234 - DNA, 25 bp, synthetic construct
  source 1..25: mol_type = other DNA
tagggctggaatagaaggaagaacc

SEQ ID NO: 235 - DNA, 25 bp, synthetic construct
  source 1..25: mol_type = other DNA
ttagggctggaatagaaggaagaac

SEQ ID NO: 236 - DNA, 25 bp, synthetic construct
  source 1..25: mol_type = other DNA
gttagggctggaatagaaggaagaa

SEQ ID NO: 237 - DNA, 25 bp, synthetic construct
  source 1..25: mol_type = other DNA
ggttagggctggaatagaaggaaga

SEQ ID NO: 238 - DNA, 25 bp, synthetic construct
  source 1..25: mol_type = other DNA
tggttagggctggaatagaaggaag

SEQ ID NO: 239 - DNA, 25 bp, synthetic construct
  source 1..25: mol_type = other DNA
gtggttagggctggaatagaaggaa

SEQ ID NO: 240 - DNA, 25 bp, synthetic construct
  source 1..25: mol_type = other DNA
agtggttagggctggaatagaagga

SEQ ID NO: 241 - DNA, 25 bp, synthetic construct
  source 1..25: mol_type = other DNA
gagtggttagggctggaatagaagg

SEQ ID NO: 242 - DNA, 25 bp, synthetic construct
  source 1..25: mol_type = other DNA
tgagtggttagggctggaatagaag

SEQ ID NO: 243 - DNA, 25 bp, synthetic construct
  source 1..25: mol_type = other DNA
ctgagtggttagggctggaatagaa

SEQ ID NO: 244 - DNA, 25 bp, synthetic construct
  source 1..25: mol_type = other DNA
cctgagtggttagggctggaataga

SEQ ID NO: 245 - DNA, 25 bp, synthetic construct
  source 1..25: mol_type = other DNA
tcctgagtggttagggctggaatag

SEQ ID NO: 246 - DNA, 25 bp, synthetic construct
  source 1..25: mol_type = other DNA
atcctgagtggttagggctggaata

SEQ ID NO: 247 - DNA, 25 bp, synthetic construct
  source 1..25: mol_type = other DNA
aatcctgagtggttagggctggaat

SEQ ID NO: 248 - DNA, 25 bp, synthetic construct
  source 1..25: mol_type = other DNA
caatcctgagtggttagggctggaa

SEQ ID NO: 249 - DNA, 25 bp, synthetic construct
  source 1..25: mol_type = other DNA
ccaatcctgagtggttagggctgga

SEQ ID NO: 250 - DNA, 25 bp, synthetic construct
  source 1..25: mol_type = other DNA
cccaatcctgagtggttagggctgg

SEQ ID NO: 251 - DNA, 25 bp, synthetic construct
  source 1..25: mol_type = other DNA
gcccaatcctgagtggttagggctg

SEQ ID NO: 252 - DNA, 25 bp, synthetic construct
  source 1..25: mol_type = other DNA
ggcccaatcctgagtggttagggct

SEQ ID NO: 253 - DNA, 25 bp, synthetic construct
  source 1..25: mol_type = other DNA
cggcccaatcctgagtggttagggc

SEQ ID NO: 254 - DNA, 25 bp, synthetic construct
  source 1..25: mol_type = other DNA
acggcccaatcctgagtggttaggg

SEQ ID NO: 255 - DNA, 25 bp, synthetic construct
  source 1..25: mol_type = other DNA
aacggcccaatcctgagtggttagg

SEQ ID NO: 256 - DNA, 25 bp, synthetic construct
  source 1..25: mol_type = other DNA
aaacggcccaatcctgagtggttag

SEQ ID NO: 257 - DNA, 25 bp, synthetic construct
  source 1..25: mol_type = other DNA
caaacggcccaatcctgagtggtta

SEQ ID NO: 258 - DNA, 25 bp, synthetic construct
  source 1..25: mol_type = other DNA
acaaacggcccaatcctgagtggtt

SEQ ID NO: 259 - DNA, 25 bp, synthetic construct
  source 1..25: mol_type = other DNA
cacaaacggcccaatcctgagtggt

SEQ ID NO: 260 - DNA, 25 bp, synthetic construct
  source 1..25: mol_type = other DNA
acacaaacggcccaatcctgagtgg

SEQ ID NO: 261 - DNA, 25 bp, synthetic construct
  source 1..25: mol_type = other DNA
gacacaaacggcccaatcctgagtg

SEQ ID NO: 262 - DNA, 25 bp, synthetic construct
  source 1..25: mol_type = other DNA
agacacaaacggcccaatcctgagt

SEQ ID NO: 263 - DNA, 25 bp, synthetic construct
  source 1..25: mol_type = other DNA
cagacacaaacggcccaatcctgag

SEQ ID NO: 264 - DNA, 25 bp, synthetic construct
  source 1..25: mol_type = other DNA
ccagacacaaacggcccaatcctga

SEQ ID NO: 265 - DNA, 25 bp, synthetic construct
  source 1..25: mol_type = other DNA
cccagacacaaacggcccaatcctg

SEQ ID NO: 266 - DNA, 25 bp, synthetic construct
  source 1..25: mol_type = other DNA
acccagacacaaacggcccaatcct

SEQ ID NO: 267 - DNA, 25 bp, synthetic construct
  source 1..25: mol_type = other DNA
tacccagacacaaacggcccaatcc

SEQ ID NO: 268 - DNA, 25 bp, synthetic construct
  source 1..25: mol_type = other DNA
atacccagacacaaacggcccaatc

SEQ ID NO: 269 - DNA, 25 bp, synthetic construct
  source 1..25: mol_type = other DNA
catacccagacacaaacggcccaat

SEQ ID NO: 270 - DNA, 25 bp, synthetic construct
  source 1..25: mol_type = other DNA
acatacccagacacaaacggcccaa

SEQ ID NO: 271 - DNA, 25 bp, synthetic construct
  source 1..25: mol_type = other DNA
gacatacccagacacaaacggccca

SEQ ID NO: 272 - DNA, 25 bp, synthetic construct
  source 1..25: mol_type = other DNA
agacatacccagacacaaacggccc

SEQ ID NO: 273 - DNA, 25 bp, synthetic construct
  source 1..25: mol_type = other DNA
gagacatacccagacacaaacggcc

SEQ ID NO: 274 - DNA, 25 bp, synthetic construct
  source 1..25: mol_type = other DNA
agagacatacccagacacaaacggc

SEQ ID NO: 275 - DNA, 25 bp, synthetic construct
  source 1..25: mol_type = other DNA
aagagacatacccagacacaaacgg

SEQ ID NO: 276 - DNA, 25 bp, synthetic construct
  source 1..25: mol_type = other DNA
gaagagacatacccagacacaaacg

SEQ ID NO: 277 - DNA, 25 bp, synthetic construct
  source 1..25: mol_type = other DNA
ggaagagacatacccagacacaaac

SEQ ID NO: 278 - DNA, 25 bp, synthetic construct
  source 1..25: mol_type = other DNA
tggaagagacatacccagacacaaa

SEQ ID NO: 279 - DNA, 25 bp, synthetic construct
  source 1..25: mol_type = other DNA
ctggaagagacatacccagacacaa

SEQ ID NO: 280 - DNA, 25 bp, synthetic construct
  source 1..25: mol_type = other DNA
gctggaagagacatacccagacaca

SEQ ID NO: 281 - DNA, 25 bp, synthetic construct
  source 1..25: mol_type = other DNA
agctggaagagacatacccagacac

SEQ ID NO: 282 - DNA, 25 bp, synthetic construct
  source 1..25: mol_type = other DNA
cagctggaagagacatacccagaca

SEQ ID NO: 283 - DNA, 25 bp, synthetic construct
  source 1..25: mol_type = other DNA
gcagctggaagagacatacccagac

SEQ ID NO: 284 - DNA, 25 bp, synthetic construct
  source 1..25: mol_type = other DNA
ggcagctggaagagacatacccaga

SEQ ID NO: 285 - DNA, 25 bp, synthetic construct
  source 1..25: mol_type = other DNA
aggcagctggaagagacatacccag

SEQ ID NO: 286 - DNA, 25 bp, synthetic construct
  source 1..25: mol_type = other DNA
caggcagctggaagagacataccca

SEQ ID NO: 287 - DNA, 25 bp, synthetic construct
  source 1..25: mol_type = other DNA
ccaggcagctggaagagacataccc

SEQ ID NO: 288 - DNA, 25 bp, synthetic construct
  source 1..25: mol_type = other DNA
cccaggcagctggaagagacatacc

SEQ ID NO: 289 - DNA, 25 bp, synthetic construct
  source 1..25: mol_type = other DNA
acccaggcagctggaagagacatac

SEQ ID NO: 290 - DNA, 25 bp, synthetic construct
  source 1..25: mol_type = other DNA
aacccaggcagctggaagagacata

SEQ ID NO: 291 - DNA, 25 bp, synthetic construct
  source 1..25: mol_type = other DNA
aaacccaggcagctggaagagacat

SEQ ID NO: 292 - DNA, 25 bp, synthetic construct
  source 1..25: mol_type = other DNA
gaaacccaggcagctggaagagaca

SEQ ID NO: 293 - DNA, 25 bp, synthetic construct
  source 1..25: mol_type = other DNA
ggaaacccaggcagctggaagagac

SEQ ID NO: 294 - DNA, 25 bp, synthetic construct
  source 1..25: mol_type = other DNA
aggaaacccaggcagctggaagaga

SEQ ID NO: 295 - DNA, 25 bp, synthetic construct
  source 1..25: mol_type = other DNA
caggaaacccaggcagctggaagag

SEQ ID NO: 296 - DNA, 25 bp, synthetic construct
  source 1..25: mol_type = other DNA
ccaggaaacccaggcagctggaaga

SEQ ID NO: 297 - DNA, 25 bp, synthetic construct
  source 1..25: mol_type = other DNA
tccaggaaacccaggcagctggaag

SEQ ID NO: 298 - DNA, 25 bp, synthetic construct
  source 1..25: mol_type = other DNA
ttccaggaaacccaggcagctggaa

SEQ ID NO: 299 - DNA, 25 bp, synthetic construct
  source 1..25: mol_type = other DNA
tttccaggaaacccaggcagctgga

SEQ ID NO: 300 - DNA, 25 bp, synthetic construct
  source 1..25: mol_type = other DNA
ctttccaggaaacccaggcagctgg

SEQ ID NO: 301 - DNA, 25 bp, synthetic construct
  source 1..25: mol_type = other DNA
tctttccaggaaacccaggcagctg

SEQ ID NO: 302 - DNA, 25 bp, synthetic construct
  source 1..25: mol_type = other DNA
ttctttccaggaaacccaggcagct

SEQ ID NO: 303 - DNA, 25 bp, synthetic construct
  source 1..25: mol_type = other DNA
gttctttccaggaaacccaggcagc

SEQ ID NO: 304 - DNA, 25 bp, synthetic construct
  source 1..25: mol_type = other DNA
agttctttccaggaaacccaggcag

SEQ ID NO: 305 - DNA, 25 bp, synthetic construct
  source 1..25: mol_type = other DNA
gagttctttccaggaaacccaggca

SEQ ID NO: 306 - DNA, 25 bp, synthetic construct
  source 1..25: mol_type = other DNA
agagttctttccaggaaacccaggc

SEQ ID NO: 307 - DNA, 25 bp, synthetic construct
  source 1..25: mol_type = other DNA
aagagttctttccaggaaacccagg

SEQ ID NO: 308 - DNA, 25 bp, synthetic construct
  source 1..25: mol_type = other DNA
taagagttctttccaggaaacccag

SEQ ID NO: 309 - DNA, 25 bp, synthetic construct
  source 1..25: mol_type = other DNA
ataagagttctttccaggaaaccca

SEQ ID NO: 310 - DNA, 25 bp, synthetic construct
  source 1..25: mol_type = other DNA
gataagagttctttccaggaaaccc

SEQ ID NO: 311 - DNA, 25 bp, synthetic construct
  source 1..25: mol_type = other DNA
ggataagagttctttccaggaaacc

SEQ ID NO: 312 - DNA, 25 bp, synthetic construct
  source 1..25: mol_type = other DNA
gggataagagttctttccaggaaac

SEQ ID NO: 313 - DNA, 25 bp, synthetic construct
  source 1..25: mol_type = other DNA
ggggataagagttctttccaggaaa

SEQ ID NO: 314 - DNA, 25 bp, synthetic construct
  source 1..25: mol_type = other DNA
tggggataagagttctttccaggaa

SEQ ID NO: 315 - DNA, 25 bp, synthetic construct
  source 1..25: mol_type = other DNA
ctggggataagagttctttccagga

SEQ ID NO: 316 - DNA, 25 bp, synthetic construct
  source 1..25: mol_type = other DNA
cctggggataagagttctttccagg

SEQ ID NO: 317 - DNA, 25 bp, synthetic construct
  source 1..25: mol_type = other DNA
tcctggggataagagttctttccag

SEQ ID NO: 318 - DNA, 25 bp, synthetic construct
  source 1..25: mol_type = other DNA
ttcctggggataagagttctttcca

SEQ ID NO: 319 - DNA, 25 bp, synthetic construct
  source 1..25: mol_type = other DNA
gttcctggggataagagttctttcc

SEQ ID NO: 320 - DNA, 25 bp, synthetic construct
  source 1..25: mol_type = other DNA
agttcctggggataagagttctttc

SEQ ID NO: 321 - DNA, 25 bp, synthetic construct
  source 1..25: mol_type = other DNA
tagttcctggggataagagttcttt

SEQ ID NO: 322 - DNA, 25 bp, synthetic construct
  source 1..25: mol_type = other DNA
ctagttcctggggataagagttctt

SEQ ID NO: 323 - DNA, 25 bp, synthetic construct
  source 1..25: mol_type = other DNA
actagttcctggggataagagttct

SEQ ID NO: 324 - DNA, 25 bp, synthetic construct
  source 1..25: mol_type = other DNA
aactagttcctggggataagagttc

SEQ ID NO: 325 - DNA, 25 bp, synthetic construct
  source 1..25: mol_type = other DNA
aaactagttcctggggataagagtt

SEQ ID NO: 326 - DNA, 25 bp, synthetic construct
  source 1..25: mol_type = other DNA
caaactagttcctggggataagagt

SEQ ID NO: 327 - DNA, 25 bp, synthetic construct
  source 1..25: mol_type = other DNA
acaaactagttcctggggataagag

SEQ ID NO: 328 - DNA, 25 bp, synthetic construct
  source 1..25: mol_type = other DNA
aacaaactagttcctggggataaga

SEQ ID NO: 329 - DNA, 25 bp, synthetic construct
  source 1..25: mol_type = other DNA
caacaaactagttcctggggataag

SEQ ID NO: 330 - DNA, 25 bp, synthetic construct
  source 1..25: mol_type = other DNA
tcaacaaactagttcctggggataa

SEQ ID NO: 331 - DNA, 25 bp, synthetic construct
  source 1..25: mol_type = other DNA
ttcaacaaactagttcctggggata

SEQ ID NO: 332 - DNA, 25 bp, synthetic construct
  source 1..25: mol_type = other DNA
attcaacaaactagttcctggggat

SEQ ID NO: 333 - DNA, 25 bp, synthetic construct
  source 1..25: mol_type = other DNA
tattcaacaaactagttcctgggga

SEQ ID NO: 334 - DNA, 25 bp, synthetic construct
  source 1..25: mol_type = other DNA
ttattcaacaaactagttcctgggg

SEQ ID NO: 335 - DNA, 25 bp, synthetic construct
  source 1..25: mol_type = other DNA
tttattcaacaaactagttcctggg

SEQ ID NO: 336 - DNA, 25 bp, synthetic construct
  source 1..25: mol_type = other DNA
atttattcaacaaactagttcctgg

SEQ ID NO: 337 - DNA, 25 bp, synthetic construct
  source 1..25: mol_type = other DNA
catttattcaacaaactagttcctg

SEQ ID NO: 338 - DNA, 25 bp, synthetic construct
  source 1..25: mol_type = other DNA
gcatttattcaacaaactagttcct

SEQ ID NO: 339 - DNA, 25 bp, synthetic construct
  source 1..25: mol_type = other DNA
agcatttattcaacaaactagttcc

SEQ ID NO: 340 - DNA, 25 bp, synthetic construct
  source 1..25: mol_type = other DNA
cagcatttattcaacaaactagttc

SEQ ID NO: 341 - DNA, 25 bp, synthetic construct
  source 1..25: mol_type = other DNA
ccagcatttattcaacaaactagtt

SEQ ID NO: 342 - DNA, 25 bp, synthetic construct
  source 1..25: mol_type = other DNA
accagcatttattcaacaaactagt

SEQ ID NO: 343 - DNA, 25 bp, synthetic construct
  source 1..25: mol_type = other DNA
caccagcatttattcaacaaactag

SEQ ID NO: 344 - DNA, 25 bp, synthetic construct
  source 1..25: mol_type = other DNA
tcaccagcatttattcaacaaacta

SEQ ID NO: 345 - DNA, 25 bp, synthetic construct
  source 1..25: mol_type = other DNA
ttcaccagcatttattcaacaaact

SEQ ID NO: 346 - DNA, 25 bp, synthetic construct
  source 1..25: mol_type = other DNA
attcaccagcatttattcaacaaac

SEQ ID NO: 347 - DNA, 25 bp, synthetic construct
  source 1..25: mol_type = other DNA
cattcaccagcatttattcaacaaa

SEQ ID NO: 348 - DNA, 25 bp, synthetic construct
  source 1..25: mol_type = other DNA
tcattcaccagcatttattcaacaa

SEQ ID NO: 349 - DNA, 25 bp, synthetic construct
  source 1..25: mol_type = other DNA
ttcattcaccagcatttattcaaca

SEQ ID NO: 350 - DNA, 25 bp, synthetic construct
  source 1..25: mol_type = other DNA
attcattcaccagcatttattcaac

SEQ ID NO: 351 - DNA, 25 bp, synthetic construct
  source 1..25: mol_type = other DNA
cattcattcaccagcatttattcaa

SEQ ID NO: 352 - DNA, 25 bp, synthetic construct
  source 1..25: mol_type = other DNA
tcattcattcaccagcatttattca

SEQ ID NO: 353 - DNA, 25 bp, synthetic construct
  source 1..25: mol_type = other DNA
ttcattcattcaccagcatttattc

SEQ ID NO: 354 - DNA, 25 bp, synthetic construct
  source 1..25: mol_type = other DNA
attcattcattcaccagcatttatt

SEQ ID NO: 355 - DNA, 25 bp, synthetic construct
  source 1..25: mol_type = other DNA
cattcattcattcaccagcatttat

SEQ ID NO: 356 - DNA, 25 bp, synthetic construct
  source 1..25: mol_type = other DNA
tcattcattcattcaccagcattta

SEQ ID NO: 357 - DNA, 25 bp, synthetic construct
  source 1..25: mol_type = other DNA
atcattcattcattcaccagcattt

SEQ ID NO: 358 - DNA, 25 bp, synthetic construct
  source 1..25: mol_type = other DNA
aatcattcattcattcaccagcatt

SEQ ID NO: 359 - DNA, 25 bp, synthetic construct
  source 1..25: mol_type = other DNA
caatcattcattcattcaccagcat

SEQ ID NO: 360 - DNA, 25 bp, synthetic construct
  source 1..25: mol_type = other DNA
tcaatcattcattcattcaccagca

SEQ ID NO: 361 - DNA, 25 bp, synthetic construct
  source 1..25: mol_type = other DNA
ttcaatcattcattcattcaccagc

SEQ ID NO: 362 - DNA, 25 bp, synthetic construct
  source 1..25: mol_type = other DNA
gttcaatcattcattcattcaccag

SEQ ID NO: 363 - DNA, 25 bp, synthetic construct
  source 1..25: mol_type = other DNA
tgttcaatcattcattcattcacca

SEQ ID NO: 364 - DNA, 25 bp, synthetic construct
  source 1..25: mol_type = other DNA
ctgttcaatcattcattcattcacc

SEQ ID NO: 365 - DNA, 25 bp, synthetic construct
  source 1..25: mol_type = other DNA
tctgttcaatcattcattcattcac

SEQ ID NO: 366 - DNA, 25 bp, synthetic construct
  source 1..25: mol_type = other DNA
atctgttcaatcattcattcattca

SEQ ID NO: 367 - DNA, 25 bp, synthetic construct
  source 1..25: mol_type = other DNA
catctgttcaatcattcattcattc

SEQ ID NO: 368 - DNA, 25 bp, synthetic construct
  source 1..25: mol_type = other DNA
tcatctgttcaatcattcattcatt

SEQ ID NO: 369 - DNA, 25 bp, synthetic construct
  source 1..25: mol_type = other DNA
ttcatctgttcaatcattcattcat

SEQ ID NO: 370 - DNA, 25 bp, synthetic construct
  source 1..25: mol_type = other DNA
attcatctgttcaatcattcattca

SEQ ID NO: 371 - DNA, 25 bp, synthetic construct
  source 1..25: mol_type = other DNA
cattcatctgttcaatcattcattc

SEQ ID NO: 372 - DNA, 25 bp, synthetic construct
  source 1..25: mol_type = other DNA
tcattcatctgttcaatcattcatt

SEQ ID NO: 373 - DNA, 25 bp, synthetic construct
  source 1..25: mol_type = other DNA
ctcattcatctgttcaatcattcat

SEQ ID NO: 374 - DNA, 25 bp, synthetic construct
  source 1..25: mol_type = other DNA
actcattcatctgttcaatcattca

SEQ ID NO: 375 - DNA, 25 bp, synthetic construct
  source 1..25: mol_type = other DNA
cactcattcatctgttcaatcattc

SEQ ID NO: 376 - DNA, 25 bp, synthetic construct
  source 1..25: mol_type = other DNA
tcactcattcatctgttcaatcatt

SEQ ID NO: 377 - DNA, 25 bp, synthetic construct
  source 1..25: mol_type = other DNA
atcactcattcatctgttcaatcat

SEQ ID NO: 378 - DNA, 25 bp, synthetic construct
  source 1..25: mol_type = other DNA
catcactcattcatctgttcaatca

SEQ ID NO: 379 - DNA, 25 bp, synthetic construct
  source 1..25: mol_type = other DNA
tcatcactcattcatctgttcaatc

SEQ ID NO: 380 - DNA, 25 bp, synthetic construct
  source 1..25: mol_type = other DNA
ctcatcactcattcatctgttcaat

SEQ ID NO: 381 - DNA, 25 bp, synthetic construct
  source 1..25: mol_type = other DNA
actcatcactcattcatctgttcaa

SEQ ID NO: 382 - DNA, 25 bp, synthetic construct
  source 1..25: mol_type = other DNA
tactcatcactcattcatctgttca

SEQ ID NO: 383 - DNA, 25 bp, synthetic construct
  source 1..25: mol_type = other DNA
ctactcatcactcattcatctgttc

SEQ ID NO: 384 - DNA, 25 bp, synthetic construct
  source 1..25: mol_type = other DNA
tctactcatcactcattcatctgtt

SEQ ID NO: 385 - DNA, 25 bp, synthetic construct
  source 1..25: mol_type = other DNA
atctactcatcactcattcatctgt

SEQ ID NO: 386 - DNA, 25 bp, synthetic construct
  source 1..25: mol_type = other DNA
tatctactcatcactcattcatctg

SEQ ID NO: 387 - DNA, 25 bp, synthetic construct
  source 1..25: mol_type = other DNA
ttatctactcatcactcattcatct

SEQ ID NO: 388 - DNA, 25 bp, synthetic construct
  source 1..25: mol_type = other DNA
tttatctactcatcactcattcatc

SEQ ID NO: 389 - DNA, 25 bp, synthetic construct
  source 1..25: mol_type = other DNA
ttttatctactcatcactcattcat

SEQ ID NO: 390 - DNA, 25 bp, synthetic construct
  source 1..25: mol_type = other DNA
cttttatctactcatcactcattca

SEQ ID NO: 391 - DNA, 25 bp, synthetic construct
  source 1..25: mol_type = other DNA
ccttttatctactcatcactcattc

SEQ ID NO: 392 - DNA, 25 bp, synthetic construct
  source 1..25: mol_type = other DNA
tccttttatctactcatcactcatt

SEQ ID NO: 393 - DNA, 25 bp, synthetic construct
  source 1..25: mol_type = other DNA
atccttttatctactcatcactcat

SEQ ID NO: 394 - DNA, 25 bp, synthetic construct
  source 1..25: mol_type = other DNA
catccttttatctactcatcactca

SEQ ID NO: 395 - DNA, 25 bp, synthetic construct
  source 1..25: mol_type = other DNA
ccatccttttatctactcatcactc

SEQ ID NO: 396 - DNA, 25 bp, synthetic construct
  source 1..25: mol_type = other DNA
tccatccttttatctactcatcact

SEQ ID NO: 397 - DNA, 25 bp, synthetic construct
  source 1..25: mol_type = other DNA
atccatccttttatctactcatcac

SEQ ID NO: 398 - DNA, 25 bp, synthetic construct
  source 1..25: mol_type = other DNA
catccatccttttatctactcatca

SEQ ID NO: 399 - DNA, 25 bp, synthetic construct
  source 1..25: mol_type = other DNA
ccatccatccttttatctactcatc

SEQ ID NO: 400 - DNA, 25 bp, synthetic construct
  source 1..25: mol_type = other DNA
tccatccatccttttatctactcat

SEQ ID NO: 401 - DNA, 25 bp, synthetic construct
  source 1..25: mol_type = other DNA
ctccatccatccttttatctactca

SEQ ID NO: 402 - DNA, 25 bp, synthetic construct
  source 1..25: mol_type = other DNA
tctccatccatccttttatctactc

SEQ ID NO: 403 - DNA, 25 bp, synthetic construct
  source 1..25: mol_type = other DNA
ctctccatccatccttttatctact

SEQ ID NO: 404 - DNA, 25 bp, synthetic construct
  source 1..25: mol_type = other DNA
tctctccatccatccttttatctac

SEQ ID NO: 405 - DNA, 25 bp, synthetic construct
  source 1..25: mol_type = other DNA
atctctccatccatccttttatcta

SEQ ID NO: 406 - DNA, 25 bp, synthetic construct
  source 1..25: mol_type = other DNA
catctctccatccatccttttatct

SEQ ID NO: 407 - DNA, 25 bp, synthetic construct
  source 1..25: mol_type = other DNA
ccatctctccatccatccttttatc

SEQ ID NO: 408 - DNA, 25 bp, synthetic construct
  source 1..25: mol_type = other DNA
cccatctctccatccatccttttat

SEQ ID NO: 409 - DNA, 25 bp, synthetic construct
  source 1..25: mol_type = other DNA
acccatctctccatccatcctttta

SEQ ID NO: 410 - DNA, 25 bp, synthetic construct
  source 1..25: mol_type = other DNA
cacccatctctccatccatcctttt

SEQ ID NO: 411 - DNA, 25 bp, synthetic construct
  source 1..25: mol_type = other DNA
tcacccatctctccatccatccttt

SEQ ID NO: 412 - DNA, 25 bp, synthetic construct
  source 1..25: mol_type = other DNA
ctcacccatctctccatccatcctt

SEQ ID NO: 413 - DNA, 25 bp, synthetic construct
  source 1..25: mol_type = other DNA
actcacccatctctccatccatcct

SEQ ID NO: 414 - DNA, 25 bp, synthetic construct
  source 1..25: mol_type = other DNA
tactcacccatctctccatccatcc

SEQ ID NO: 415 - DNA, 25 bp, synthetic construct
  source 1..25: mol_type = other DNA
gtactcacccatctctccatccatc

SEQ ID NO: 416 - DNA, 25 bp, synthetic construct
  source 1..25: mol_type = other DNA
tgtactcacccatctctccatccat

SEQ ID NO: 417 - DNA, 25 bp, synthetic construct
  source 1..25: mol_type = other DNA
atgtactcacccatctctccatcca

SEQ ID NO: 418 - DNA, 25 bp, synthetic construct
  source 1..25: mol_type = other DNA
catgtactcacccatctctccatcc

SEQ ID NO: 419 - DNA, 25 bp, synthetic construct
  source 1..25: mol_type = other DNA
ccatgtactcacccatctctccatc

SEQ ID NO: 420 - DNA, 25 bp, synthetic construct
  source 1..25: mol_type = other DNA
tccatgtactcacccatctctccat

SEQ ID NO: 421 - DNA, 25 bp, synthetic construct
  source 1..25: mol_type = other DNA
atccatgtactcacccatctctcca

SEQ ID NO: 422 - DNA, 25 bp, synthetic construct
  source 1..25: mol_type = other DNA
catccatgtactcacccatctctcc

SEQ ID NO: 423 - DNA, 25 bp, synthetic construct
  source 1..25: mol_type = other DNA
ccatccatgtactcacccatctctc

SEQ ID NO: 424 - DNA, 25 bp, synthetic construct
  source 1..25: mol_type = other DNA
tccatccatgtactcacccatctct

SEQ ID NO: 425 - DNA, 25 bp, synthetic construct
  source 1..25: mol_type = other DNA
atccatccatgtactcacccatctc

SEQ ID NO: 426 - DNA, 25 bp, synthetic construct
  source 1..25: mol_type = other DNA
tatccatccatgtactcacccatct

SEQ ID NO: 427 - DNA, 25 bp, synthetic construct
  source 1..25: mol_type = other DNA
ctatccatccatgtactcacccatc

SEQ ID NO: 428 - DNA, 25 bp, synthetic construct
  source 1..25: mol_type = other DNA
tctatccatccatgtactcacccat

SEQ ID NO: 429 - DNA, 25 bp, synthetic construct
  source 1..25: mol_type = other DNA
atctatccatccatgtactcaccca

SEQ ID NO: 430 - DNA, 25 bp, synthetic construct
  source 1..25: mol_type = other DNA
catctatccatccatgtactcaccc

SEQ ID NO: 431 - DNA, 25 bp, synthetic construct
  source 1..25: mol_type = other DNA
ccatctatccatccatgtactcacc

SEQ ID NO: 432 - DNA, 25 bp, synthetic construct
  source 1..25: mol_type = other DNA
tccatctatccatccatgtactcac

SEQ ID NO: 433 - DNA, 25 bp, synthetic construct
  source 1..25: mol_type = other DNA
atccatctatccatccatgtactca

SEQ ID NO: 434 - DNA, 25 bp, synthetic construct
  source 1..25: mol_type = other DNA
catccatctatccatccatgtactc

SEQ ID NO: 435 - DNA, 25 bp, synthetic construct
  source 1..25: mol_type = other DNA
tcatccatctatccatccatgtact

SEQ ID NO: 436 - DNA, 25 bp, synthetic construct
  source 1..25: mol_type = other DNA
ctcatccatctatccatccatgtac

SEQ ID NO: 437 - DNA, 25 bp, synthetic construct
  source 1..25: mol_type = other DNA
actcatccatctatccatccatgta

SEQ ID NO: 438 - DNA, 25 bp, synthetic construct
  source 1..25: mol_type = other DNA
aactcatccatctatccatccatgt

SEQ ID NO: 439 - DNA, 25 bp, synthetic construct
  source 1..25: mol_type = other DNA
caactcatccatctatccatccatg

SEQ ID NO: 440 - DNA, 25 bp, synthetic construct
  source 1..25: mol_type = other DNA
ccaactcatccatctatccatccat

SEQ ID NO: 441 - DNA, 25 bp, synthetic construct
  source 1..25: mol_type = other DNA
accaactcatccatctatccatcca

SEQ ID NO: 442 - DNA, 25 bp, synthetic construct
  source 1..25: mol_type = other DNA
caccaactcatccatctatccatcc

SEQ ID NO: 443 - DNA, 25 bp, synthetic construct
  source 1..25: mol_type = other DNA
ccaccaactcatccatctatccatc

SEQ ID NO: 444 - DNA, 25 bp, synthetic construct
  source 1..25: mol_type = other DNA
cccaccaactcatccatctatccat

SEQ ID NO: 445 - DNA, 25 bp, synthetic construct
  source 1..25: mol_type = other DNA
acccaccaactcatccatctatcca

SEQ ID NO: 446 - DNA, 25 bp, synthetic construct
  source 1..25: mol_type = other DNA
tacccaccaactcatccatctatcc

SEQ ID NO: 447 - DNA, 25 bp, synthetic construct
  source 1..25: mol_type = other DNA
ctacccaccaactcatccatctatc

SEQ ID NO: 448 - DNA, 25 bp, synthetic construct
  source 1..25: mol_type = other DNA
tctacccaccaactcatccatctat

SEQ ID NO: 449 - DNA, 25 bp, synthetic construct
  source 1..25: mol_type = other DNA
atctacccaccaactcatccatcta

SEQ ID NO: 450 - DNA, 25 bp, synthetic construct
  source 1..25: mol_type = other DNA
aatctacccaccaactcatccatct

SEQ ID NO: 451 - DNA, 25 bp, synthetic construct
  source 1..25: mol_type = other DNA
gaatctacccaccaactcatccatc

SEQ ID NO: 452 - DNA, 25 bp, synthetic construct
  source 1..25: mol_type = other DNA
cgaatctacccaccaactcatccat

SEQ ID NO: 453 - DNA, 25 bp, synthetic construct
  source 1..25: mol_type = other DNA
acgaatctacccaccaactcatcca

SEQ ID NO: 454 - DNA, 25 bp, synthetic construct
  source 1..25: mol_type = other DNA
cacgaatctacccaccaactcatcc

SEQ ID NO: 455 - DNA, 25 bp, synthetic construct
  source 1..25: mol_type = other DNA
ccacgaatctacccaccaactcatc

SEQ ID NO: 456 - DNA, 25 bp, synthetic construct
  source 1..25: mol_type = other DNA
gccacgaatctacccaccaactcat

SEQ ID NO: 457 - DNA, 25 bp, synthetic construct
  source 1..25: mol_type = other DNA
agccacgaatctacccaccaactca

SEQ ID NO: 458 - DNA, 25 bp, synthetic construct
  source 1..25: mol_type = other DNA
tagccacgaatctacccaccaactc

SEQ ID NO: 459 - DNA, 25 bp, synthetic construct
  source 1..25: mol_type = other DNA
ctagccacgaatctacccaccaact

SEQ ID NO: 460 - DNA, 25 bp, synthetic construct
  source 1..25: mol_type = other DNA
tctagccacgaatctacccaccaac

SEQ ID NO: 461 - DNA, 25 bp, synthetic construct
  source 1..25: mol_type = other DNA
atctagccacgaatctacccaccaa

SEQ ID NO: 462 - DNA, 25 bp, synthetic construct
  source 1..25: mol_type = other DNA
catctagccacgaatctacccacca

SEQ ID NO: 463 - DNA, 25 bp, synthetic construct
  source 1..25: mol_type = other DNA
ccatctagccacgaatctacccacc

SEQ ID NO: 464 - DNA, 25 bp, synthetic construct
  source 1..25: mol_type = other DNA
tccatctagccacgaatctacccac

SEQ ID NO: 465 - DNA, 25 bp, synthetic construct
  source 1..25: mol_type = other DNA
atccatctagccacgaatctaccca

SEQ ID NO: 466 - DNA, 25 bp, synthetic construct
  source 1..25: mol_type = other DNA
catccatctagccacgaatctaccc

SEQ ID NO: 467 - DNA, 25 bp, synthetic construct
  source 1..25: mol_type = other DNA
tcatccatctagccacgaatctacc

SEQ ID NO: 468 - DNA, 25 bp, synthetic construct
  source 1..25: mol_type = other DNA
atcatccatctagccacgaatctac

SEQ ID NO: 469 - DNA, 25 bp, synthetic construct
  source 1..25: mol_type = other DNA
catcatccatctagccacgaatcta

SEQ ID NO: 470 - DNA, 25 bp, synthetic construct
  source 1..25: mol_type = other DNA
ccatcatccatctagccacgaatct

SEQ ID NO: 471 - DNA, 25 bp, synthetic construct
  source 1..25: mol_type = other DNA
tccatcatccatctagccacgaatc

SEQ ID NO: 472 - DNA, 25 bp, synthetic construct
  source 1..25: mol_type = other DNA
atccatcatccatctagccacgaat

SEQ ID NO: 473 - DNA, 25 bp, synthetic construct
  source 1..25: mol_type = other DNA
catccatcatccatctagccacgaa

SEQ ID NO: 474 - DNA, 25 bp, synthetic construct
  source 1..25: mol_type = other DNA
ccatccatcatccatctagccacga

SEQ ID NO: 475 - DNA, 25 bp, synthetic construct
  source 1..25: mol_type = other DNA
tccatccatcatccatctagccacg

SEQ ID NO: 476 - DNA, 25 bp, synthetic construct
  source 1..25: mol_type = other DNA
atccatccatcatccatctagccac

SEQ ID NO: 477 - DNA, 25 bp, synthetic construct
  source 1..25: mol_type = other DNA
catccatccatcatccatctagcca

SEQ ID NO: 478 - DNA, 25 bp, synthetic construct
  source 1..25: mol_type = other DNA
ccatccatccatcatccatctagcc

SEQ ID NO: 479 - DNA, 25 bp, synthetic construct
  source 1..25: mol_type = other DNA
tccatccatccatcatccatctagc

SEQ ID NO: 480 - DNA, 25 bp, synthetic construct
  source 1..25: mol_type = other DNA
gtccatccatccatcatccatctag

SEQ ID NO: 481 - DNA, 25 bp, synthetic construct
  source 1..25: mol_type = other DNA
tgtccatccatccatcatccatcta

SEQ ID NO: 482 - DNA, 25 bp, synthetic construct
  source 1..25: mol_type = other DNA
ctgtccatccatccatcatccatct

SEQ ID NO: 483 - DNA, 25 bp, synthetic construct
  source 1..25: mol_type = other DNA
tctgtccatccatccatcatccatc

SEQ ID NO: 484 - DNA, 25 bp, synthetic construct
  source 1..25: mol_type = other DNA
atctgtccatccatccatcatccat

SEQ ID NO: 485 - DNA, 25 bp, synthetic construct
  source 1..25: mol_type = other DNA
catctgtccatccatccatcatcca

SEQ ID NO: 486 - DNA, 25 bp, synthetic construct
  source 1..25: mol_type = other DNA
ccatctgtccatccatccatcatcc

SEQ ID NO: 487 - DNA, 25 bp, synthetic construct
  source 1..25: mol_type = other DNA
tccatctgtccatccatccatcatc

SEQ ID NO: 488 - DNA, 25 bp, synthetic construct
  source 1..25: mol_type = other DNA
atccatctgtccatccatccatcat

SEQ ID NO: 489 - DNA, 25 bp, synthetic construct
  source 1..25: mol_type = other DNA
catccatctgtccatccatccatca

SEQ ID NO: 490 - DNA, 25 bp, synthetic construct
  source 1..25: mol_type = other DNA
ccatccatctgtccatccatccatc

SEQ ID NO: 491 - DNA, 25 bp, synthetic construct
  source 1..25: mol_type = other DNA
tccatccatctgtccatccatccat

SEQ ID NO: 492 - DNA, 25 bp, synthetic construct
  source 1..25: mol_type = other DNA
atccatccatctgtccatccatcca

SEQ ID NO: 493 - DNA, 25 bp, synthetic construct
  source 1..25: mol_type = other DNA
tatccatccatctgtccatccatcc

SEQ ID NO: 494 - DNA, 25 bp, synthetic construct
  source 1..25: mol_type = other DNA
atatccatccatctgtccatccatc

SEQ ID NO: 495 - DNA, 25 bp, synthetic construct
  source 1..25: mol_type = other DNA
tatatccatccatctgtccatccat

SEQ ID NO: 496 - DNA, 25 bp, synthetic construct
  source 1..25: mol_type = other DNA
atatatccatccatctgtccatcca

SEQ ID NO: 497 - DNA, 25 bp, synthetic construct
  source 1..25: mol_type = other DNA
catatatccatccatctgtccatcc

SEQ ID NO: 498 - DNA, 25 bp, synthetic construct
  source 1..25: mol_type = other DNA
tcatatatccatccatctgtccatc

SEQ ID NO: 499 - DNA, 25 bp, synthetic construct
  source 1..25: mol_type = other DNA
atcatatatccatccatctgtccat

SEQ ID NO: 500 - DNA, 25 bp, synthetic construct
  source 1..25: mol_type = other DNA
aatcatatatccatccatctgtcca

SEQ ID NO: 501 - DNA, 25 bp, synthetic construct
  source 1..25: mol_type = other DNA
caatcatatatccatccatctgtcc

SEQ ID NO: 502 - DNA, 25 bp, synthetic construct
  source 1..25: mol_type = other DNA
tcaatcatatatccatccatctgtc

SEQ ID NO: 503 - DNA, 25 bp, synthetic construct
  source 1..25: mol_type = other DNA
ttcaatcatatatccatccatctgt

SEQ ID NO: 504 - DNA, 25 bp, synthetic construct
  source 1..25: mol_type = other DNA
gttcaatcatatatccatccatctg

SEQ ID NO: 505 - DNA, 25 bp, synthetic construct
  source 1..25: mol_type = other DNA
agttcaatcatatatccatccatct

SEQ ID NO: 506 - DNA, 25 bp, synthetic construct
  source 1..25: mol_type = other DNA
tagttcaatcatatatccatccatc

SEQ ID NO: 507 - DNA, 25 bp, synthetic construct
  source 1..25: mol_type = other DNA
atagttcaatcatatatccatccat

SEQ ID NO: 508 - DNA, 25 bp, synthetic construct
  source 1..25: mol_type = other DNA
aatagttcaatcatatatccatcca

SEQ ID NO: 509 - DNA, 25 bp, synthetic construct
  source 1..25: mol_type = other DNA
caatagttcaatcatatatccatcc

SEQ ID NO: 510 - DNA, 25 bp, synthetic construct
  source 1..25: mol_type = other DNA
tcaatagttcaatcatatatccatc

SEQ ID NO: 511 - DNA, 25 bp, synthetic construct
  source 1..25: mol_type = other DNA
ttcaatagttcaatcatatatccat

SEQ ID NO: 512 - DNA, 25 bp, synthetic construct
  source 1..25: mol_type = other DNA
tttcaatagttcaatcatatatcca

SEQ ID NO: 513 - DNA, 25 bp, synthetic construct
  source 1..25: mol_type = other DNA
ctttcaatagttcaatcatatatcc

SEQ ID NO: 514 - DNA, 25 bp, synthetic construct
  source 1..25: mol_type = other DNA
actttcaatagttcaatcatatatc

SEQ ID NO: 515 - DNA, 25 bp, synthetic construct
  source 1..25: mol_type = other DNA
tactttcaatagttcaatcatatat

SEQ ID NO: 516 - DNA, 25 bp, synthetic construct
  source 1..25: mol_type = other DNA
atactttcaatagttcaatcatata

SEQ ID NO: 517 - DNA, 25 bp, synthetic construct
  source 1..25: mol_type = other DNA
tatactttcaatagttcaatcatat

SEQ ID NO: 518 - DNA, 25 bp, synthetic construct
  source 1..25: mol_type = other DNA
ctatactttcaatagttcaatcata

SEQ ID NO: 519 - DNA, 25 bp, synthetic construct
  source 1..25: mol_type = other DNA
tctatactttcaatagttcaatcat

SEQ ID NO: 520 - DNA, 25 bp, synthetic construct
  source 1..25: mol_type = other DNA
atctatactttcaatagttcaatca

SEQ ID NO: 521 - DNA, 25 bp, synthetic construct
  source 1..25: mol_type = other DNA
catctatactttcaatagttcaatc

SEQ ID NO: 522 - DNA, 25 bp, synthetic construct
  source 1..25: mol_type = other DNA
acatctatactttcaatagttcaat

SEQ ID NO: 523 - DNA, 25 bp, synthetic construct
  source 1..25: mol_type = other DNA
tacatctatactttcaatagttcaa

SEQ ID NO: 524 - DNA, 25 bp, synthetic construct
  source 1..25: mol_type = other DNA
atacatctatactttcaatagttca

SEQ ID NO: 525 - DNA, 25 bp, synthetic construct
  source 1..25: mol_type = other DNA
catacatctatactttcaatagttc

SEQ ID NO: 526 - DNA, 25 bp, synthetic construct
  source 1..25: mol_type = other DNA
ccatacatctatactttcaatagtt

SEQ ID NO: 527 - DNA, 25 bp, synthetic construct
  source 1..25: mol_type = other DNA
tccatacatctatactttcaatagt

SEQ ID NO: 528 - DNA, 25 bp, synthetic construct
  source 1..25: mol_type = other DNA
atccatacatctatactttcaatag

SEQ ID NO: 529 - DNA, 25 bp, synthetic construct
  source 1..25: mol_type = other DNA
catccatacatctatactttcaata

SEQ ID NO: 530 - DNA, 25 bp, synthetic construct
  source 1..25: mol_type = other DNA
ccatccatacatctatactttcaat

SEQ ID NO: 531 - DNA, 25 bp, synthetic construct
  source 1..25: mol_type = other DNA
cccatccatacatctatactttcaa

SEQ ID NO: 532 - DNA, 25 bp, synthetic construct
  source 1..25: mol_type = other DNA
acccatccatacatctatactttca

SEQ ID NO: 533 - DNA, 25 bp, synthetic construct
  source 1..25: mol_type = other DNA
cacccatccatacatctatactttc

SEQ ID NO: 534 - DNA, 25 bp, synthetic construct
  source 1..25: mol_type = other DNA
tcacccatccatacatctatacttt

SEQ ID NO: 535 - DNA, 25 bp, synthetic construct
  source 1..25: mol_type = other DNA
ttcacccatccatacatctatactt

SEQ ID NO: 536 - DNA, 25 bp, synthetic construct
  source 1..25: mol_type = other DNA
attcacccatccatacatctatact

SEQ ID NO: 537 - DNA, 25 bp, synthetic construct
  source 1..25: mol_type = other DNA
aattcacccatccatacatctatac

SEQ ID NO: 538 - DNA, 25 bp, synthetic construct
  source 1..25: mol_type = other DNA
aaattcacccatccatacatctata

SEQ ID NO: 539 - DNA, 25 bp, synthetic construct
  source 1..25: mol_type = other DNA
caaattcacccatccatacatctat

SEQ ID NO: 540 - DNA, 25 bp, synthetic construct
  source 1..25: mol_type = other DNA
ccaaattcacccatccatacatcta

SEQ ID NO: 541 - DNA, 25 bp, synthetic construct
  source 1..25: mol_type = other DNA
cccaaattcacccatccatacatct

SEQ ID NO: 542 - DNA, 25 bp, synthetic construct
  source 1..25: mol_type = other DNA
ccccaaattcacccatccatacatc

SEQ ID NO: 543 - DNA, 25 bp, synthetic construct
  source 1..25: mol_type = other DNA
cccccaaattcacccatccatacat

SEQ ID NO: 544 - DNA, 25 bp, synthetic construct
  source 1..25: mol_type = other DNA
acccccaaattcacccatccataca

SEQ ID NO: 545 - DNA, 25 bp, synthetic construct
  source 1..25: mol_type = other DNA
tacccccaaattcacccatccatac

SEQ ID NO: 546 - DNA, 25 bp, synthetic construct
  source 1..25: mol_type = other DNA
ttacccccaaattcacccatccata

SEQ ID NO: 547 - DNA, 25 bp, synthetic construct
  source 1..25: mol_type = other DNA
attacccccaaattcacccatccat

SEQ ID NO: 548 - DNA, 25 bp, synthetic construct
  source 1..25: mol_type = other DNA
aattacccccaaattcacccatcca

SEQ ID NO: 549 - DNA, 25 bp, synthetic construct
  source 1..25: mol_type = other DNA
caattacccccaaattcacccatcc

SEQ ID NO: 550 - DNA, 25 bp, synthetic construct
  source 1..25: mol_type = other DNA
acaattacccccaaattcacccatc

SEQ ID NO: 551 - DNA, 25 bp, synthetic construct
  source 1..25: mol_type = other DNA
aacaattacccccaaattcacccat

SEQ ID NO: 552 - DNA, 25 bp, synthetic construct
  source 1..25: mol_type = other DNA
taacaattacccccaaattcaccca

SEQ ID NO: 553 - DNA, 25 bp, synthetic construct
  source 1..25: mol_type = other DNA
ctaacaattacccccaaattcaccc

SEQ ID NO: 554 - DNA, 25 bp, synthetic construct
  source 1..25: mol_type = other DNA
tctaacaattacccccaaattcacc

SEQ ID NO: 555 - DNA, 25 bp, synthetic construct
  source 1..25: mol_type = other DNA
atctaacaattacccccaaattcac

SEQ ID NO: 556 - DNA, 25 bp, synthetic construct
  source 1..25: mol_type = other DNA
catctaacaattacccccaaattca

SEQ ID NO: 557 - DNA, 25 bp, synthetic construct
  source 1..25: mol_type = other DNA
tcatctaacaattacccccaaattc

SEQ ID NO: 558 - DNA, 25 bp, synthetic construct
  source 1..25: mol_type = other DNA
atcatctaacaattacccccaaatt

SEQ ID NO: 559 - DNA, 25 bp, synthetic construct
  source 1..25: mol_type = other DNA
catcatctaacaattacccccaaat

SEQ ID NO: 560 - DNA, 25 bp, synthetic construct
  source 1..25: mol_type = other DNA
ccatcatctaacaattacccccaaa

SEQ ID NO: 561 - DNA, 25 bp, synthetic construct
  source 1..25: mol_type = other DNA
tccatcatctaacaattacccccaa

SEQ ID NO: 562 - DNA, 25 bp, synthetic construct
  source 1..25: mol_type = other DNA
atccatcatctaacaattaccccca

SEQ ID NO: 563 - DNA, 25 bp, synthetic construct
  source 1..25: mol_type = other DNA
catccatcatctaacaattaccccc

SEQ ID NO: 564 - DNA, 25 bp, synthetic construct
  source 1..25: mol_type = other DNA
tcatccatcatctaacaattacccc

SEQ ID NO: 565 - DNA, 25 bp, synthetic construct
  source 1..25: mol_type = other DNA
ctcatccatcatctaacaattaccc

SEQ ID NO: 566 - DNA, 25 bp, synthetic construct
  source 1..25: mol_type = other DNA
actcatccatcatctaacaattacc

SEQ ID NO: 567 - DNA, 25 bp, synthetic construct
  source 1..25: mol_type = other DNA
tactcatccatcatctaacaattac

SEQ ID NO: 568 - DNA, 25 bp, synthetic construct
  source 1..25: mol_type = other DNA
atactcatccatcatctaacaatta

SEQ ID NO: 569 - DNA, 25 bp, synthetic construct
  source 1..25: mol_type = other DNA
tatactcatccatcatctaacaatt

SEQ ID NO: 570 - DNA, 25 bp, synthetic construct
  source 1..25: mol_type = other DNA
ctatactcatccatcatctaacaat

SEQ ID NO: 571 - DNA, 25 bp, synthetic construct
  source 1..25: mol_type = other DNA
tctatactcatccatcatctaacaa

SEQ ID NO: 572 - DNA, 25 bp, synthetic construct
  source 1..25: mol_type = other DNA
atctatactcatccatcatctaaca

SEQ ID NO: 573 - DNA, 25 bp, synthetic construct
  source 1..25: mol_type = other DNA
catctatactcatccatcatctaac

SEQ ID NO: 574 - DNA, 25 bp, synthetic construct
  source 1..25: mol_type = other DNA
tcatctatactcatccatcatctaa

SEQ ID NO: 575 - DNA, 25 bp, synthetic construct
  source 1..25: mol_type = other DNA
ttcatctatactcatccatcatcta

SEQ ID NO: 576 - DNA, 25 bp, synthetic construct
  source 1..25: mol_type = other DNA
attcatctatactcatccatcatct

SEQ ID NO: 577 - DNA, 25 bp, synthetic construct
  source 1..25: mol_type = other DNA
cattcatctatactcatccatcatc

SEQ ID NO: 578 - DNA, 25 bp, synthetic construct
  source 1..25: mol_type = other DNA
tcattcatctatactcatccatcat

SEQ ID NO: 579 - DNA, 25 bp, synthetic construct
  source 1..25: mol_type = other DNA
atcattcatctatactcatccatca

SEQ ID NO: 580 - DNA, 25 bp, synthetic construct
  source 1..25: mol_type = other DNA
catcattcatctatactcatccatc

SEQ ID NO: 581 - DNA, 25 bp, synthetic construct
  source 1..25: mol_type = other DNA
ccatcattcatctatactcatccat

SEQ ID NO: 582 - DNA, 25 bp, synthetic construct
  source 1..25: mol_type = other DNA
tccatcattcatctatactcatcca

SEQ ID NO: 583 - DNA, 25 bp, synthetic construct
  source 1..25: mol_type = other DNA
atccatcattcatctatactcatcc

SEQ ID NO: 584 - DNA, 25 bp, synthetic construct
  source 1..25: mol_type = other DNA
catccatcattcatctatactcatc

SEQ ID NO: 585 - DNA, 25 bp, synthetic construct
  source 1..25: mol_type = other DNA
ccatccatcattcatctatactcat

SEQ ID NO: 586 - DNA, 25 bp, synthetic construct
  source 1..25: mol_type = other DNA
tccatccatcattcatctatactca

SEQ ID NO: 587 - DNA, 25 bp, synthetic construct
  source 1..25: mol_type = other DNA
atccatccatcattcatctatactc

SEQ ID NO: 588 - DNA, 25 bp, synthetic construct
  source 1..25: mol_type = other DNA
tatccatccatcattcatctatact

SEQ ID NO: 589 - DNA, 25 bp, synthetic construct
  source 1..25: mol_type = other DNA
ttatccatccatcattcatctatac

SEQ ID NO: 590 - DNA, 25 bp, synthetic construct
  source 1..25: mol_type = other DNA
gttatccatccatcattcatctata

SEQ ID NO: 591 - DNA, 25 bp, synthetic construct
  source 1..25: mol_type = other DNA
agttatccatccatcattcatctat

SEQ ID NO: 592 - DNA, 25 bp, synthetic construct
  source 1..25: mol_type = other DNA
aagttatccatccatcattcatcta

SEQ ID NO: 593 - DNA, 25 bp, synthetic construct
  source 1..25: mol_type = other DNA
caagttatccatccatcattcatct

SEQ ID NO: 594 - DNA, 25 bp, synthetic construct
  source 1..25: mol_type = other DNA
tcaagttatccatccatcattcatc

SEQ ID NO: 595 - DNA, 25 bp, synthetic construct
  source 1..25: mol_type = other DNA
atcaagttatccatccatcattcat

SEQ ID NO: 596 - DNA, 25 bp, synthetic construct
  source 1..25: mol_type = other DNA
catcaagttatccatccatcattca

SEQ ID NO: 597 - DNA, 25 bp, synthetic construct
  source 1..25: mol_type = other DNA
tcatcaagttatccatccatcattc

SEQ ID NO: 598 - DNA, 25 bp, synthetic construct
  source 1..25: mol_type = other DNA
ctcatcaagttatccatccatcatt

SEQ ID NO: 599 - DNA, 25 bp, synthetic construct
  source 1..25: mol_type = other DNA
actcatcaagttatccatccatcat

SEQ ID NO: 600 - DNA, 25 bp, synthetic construct
  source 1..25: mol_type = other DNA
cactcatcaagttatccatccatca

SEQ ID NO: 601 - DNA, 25 bp, synthetic construct
  source 1..25: mol_type = other DNA
ccactcatcaagttatccatccatc

SEQ ID NO: 602 - DNA, 25 bp, synthetic construct
  source 1..25: mol_type = other DNA
tccactcatcaagttatccatccat

SEQ ID NO: 603 - DNA, 25 bp, synthetic construct
  source 1..25: mol_type = other DNA
atccactcatcaagttatccatcca

SEQ ID NO: 604 - DNA, 25 bp, synthetic construct
  source 1..25: mol_type = other DNA
tatccactcatcaagttatccatcc

SEQ ID NO: 605 - DNA, 25 bp, synthetic construct
  source 1..25: mol_type = other DNA
ctatccactcatcaagttatccatc

SEQ ID NO: 606 - DNA, 25 bp, synthetic construct
  source 1..25: mol_type = other DNA
tctatccactcatcaagttatccat

SEQ ID NO: 607 - DNA, 25 bp, synthetic construct
  source 1..25: mol_type = other DNA
atctatccactcatcaagttatcca

SEQ ID NO: 608 - DNA, 25 bp, synthetic construct
  source 1..25: mol_type = other DNA
tatctatccactcatcaagttatcc

SEQ ID NO: 609 - DNA, 25 bp, synthetic construct
  source 1..25: mol_type = other DNA
ctatctatccactcatcaagttatc

SEQ ID NO: 610 - DNA, 25 bp, synthetic construct
  source 1..25: mol_type = other DNA
tctatctatccactcatcaagttat

SEQ ID NO: 611 - DNA, 25 bp, synthetic construct
  source 1..25: mol_type = other DNA
atctatctatccactcatcaagtta

SEQ ID NO: 612 - DNA, 25 bp, synthetic construct
  source 1..25: mol_type = other DNA
aatctatctatccactcatcaagtt

SEQ ID NO: 613 - DNA, 25 bp, synthetic construct
  source 1..25: mol_type = other DNA
caatctatctatccactcatcaagt

SEQ ID NO: 614 - DNA, 25 bp, synthetic construct
  source 1..25: mol_type = other DNA
gcaatctatctatccactcatcaag

SEQ ID NO: 615 - DNA, 25 bp, synthetic construct
  source 1..25: mol_type = other DNA
agcaatctatctatccactcatcaa

SEQ ID NO: 616 - DNA, 25 bp, synthetic construct
  source 1..25: mol_type = other DNA
cagcaatctatctatccactcatca

SEQ ID NO: 617 - DNA, 25 bp, synthetic construct
  source 1..25: mol_type = other DNA
ccagcaatctatctatccactcatc

SEQ ID NO: 618 - DNA, 25 bp, synthetic construct
  source 1..25: mol_type = other DNA
tccagcaatctatctatccactcat

SEQ ID NO: 619 - DNA, 25 bp, synthetic construct
  source 1..25: mol_type = other DNA
atccagcaatctatctatccactca

SEQ ID NO: 620 - DNA, 25 bp, synthetic construct
  source 1..25: mol_type = other DNA
tatccagcaatctatctatccactc

SEQ ID NO: 621 - DNA, 25 bp, synthetic construct
  source 1..25: mol_type = other DNA
ctatccagcaatctatctatccact

SEQ ID NO: 622 - DNA, 25 bp, synthetic construct
  source 1..25: mol_type = other DNA
tctatccagcaatctatctatccac

SEQ ID NO: 623 - DNA, 25 bp, synthetic construct
  source 1..25: mol_type = other DNA
atctatccagcaatctatctatcca

SEQ ID NO: 624 - DNA, 25 bp, synthetic construct
  source 1..25: mol_type = other DNA
catctatccagcaatctatctatcc

SEQ ID NO: 625 - DNA, 25 bp, synthetic construct
  source 1..25: mol_type = other DNA
tcatctatccagcaatctatctatc

SEQ ID NO: 626 - DNA, 25 bp, synthetic construct
  source 1..25: mol_type = other DNA
atcatctatccagcaatctatctat

SEQ ID NO: 627 - DNA, 25 bp, synthetic construct
  source 1..25: mol_type = other DNA
aatcatctatccagcaatctatcta

SEQ ID NO: 628 - DNA, 25 bp, synthetic construct
  source 1..25: mol_type = other DNA
caatcatctatccagcaatctatct

SEQ ID NO: 629 - DNA, 25 bp, synthetic construct
  source 1..25: mol_type = other DNA
tcaatcatctatccagcaatctatc

SEQ ID NO: 630 - DNA, 25 bp, synthetic construct
  source 1..25: mol_type = other DNA
gtcaatcatctatccagcaatctat

SEQ ID NO: 631 - DNA, 25 bp, synthetic construct
  source 1..25: mol_type = other DNA
agtcaatcatctatccagcaatcta

SEQ ID NO: 632 - DNA, 25 bp, synthetic construct
  source 1..25: mol_type = other DNA
cagtcaatcatctatccagcaatct

SEQ ID NO: 633 - DNA, 25 bp, synthetic construct
  source 1..25: mol_type = other DNA
ccagtcaatcatctatccagcaatc

SEQ ID NO: 634 - DNA, 25 bp, synthetic construct
  source 1..25: mol_type = other DNA
cccagtcaatcatctatccagcaat

SEQ ID NO: 635 - DNA, 25 bp, synthetic construct
  source 1..25: mol_type = other DNA
acccagtcaatcatctatccagcaa

SEQ ID NO: 636 - DNA, 25 bp, synthetic construct
  source 1..25: mol_type = other DNA
cacccagtcaatcatctatccagca

SEQ ID NO: 637 - DNA, 25 bp, synthetic construct
  source 1..25: mol_type = other DNA
ccacccagtcaatcatctatccagc

SEQ ID NO: 638 - DNA, 25 bp, synthetic construct
  source 1..25: mol_type = other DNA
tccacccagtcaatcatctatccag

SEQ ID NO: 639 - DNA, 25 bp, synthetic construct
  source 1..25: mol_type = other DNA
atccacccagtcaatcatctatcca

SEQ ID NO: 640 - DNA, 25 bp, synthetic construct
  source 1..25: mol_type = other DNA
tatccacccagtcaatcatctatcc

SEQ ID NO: 641 - DNA, 25 bp, synthetic construct
  source 1..25: mol_type = other DNA
ctatccacccagtcaatcatctatc

SEQ ID NO: 642 - DNA, 25 bp, synthetic construct
  source 1..25: mol_type = other DNA
tctatccacccagtcaatcatctat

SEQ ID NO: 643 - DNA, 25 bp, synthetic construct
  source 1..25: mol_type = other DNA
atctatccacccagtcaatcatcta

SEQ ID NO: 644 - DNA, 25 bp, synthetic construct
  source 1..25: mol_type = other DNA
catctatccacccagtcaatcatct

SEQ ID NO: 645 - DNA, 25 bp, synthetic construct
  source 1..25: mol_type = other DNA
tcatctatccacccagtcaatcatc

SEQ ID NO: 646 - DNA, 25 bp, synthetic construct
  source 1..25: mol_type = other DNA
ttcatctatccacccagtcaatcat

SEQ ID NO: 647 - DNA, 25 bp, synthetic construct
  source 1..25: mol_type = other DNA
tttcatctatccacccagtcaatca

SEQ ID NO: 648 - DNA, 25 bp, synthetic construct
  source 1..25: mol_type = other DNA
atttcatctatccacccagtcaatc

SEQ ID NO: 649 - DNA, 25 bp, synthetic construct
  source 1..25: mol_type = other DNA
catttcatctatccacccagtcaat

SEQ ID NO: 650 - DNA, 25 bp, synthetic construct
  source 1..25: mol_type = other DNA
acatttcatctatccacccagtcaa

SEQ ID NO: 651 - DNA, 25 bp, synthetic construct
  source 1..25: mol_type = other DNA
aacatttcatctatccacccagtca

SEQ ID NO: 652 - DNA, 25 bp, synthetic construct
  source 1..25: mol_type = other DNA
caacatttcatctatccacccagtc

SEQ ID NO: 653 - DNA, 25 bp, synthetic construct
  source 1..25: mol_type = other DNA
ccaacatttcatctatccacccagt

SEQ ID NO: 654 - DNA, 25 bp, synthetic construct
  source 1..25: mol_type = other DNA
tccaacatttcatctatccacccag

SEQ ID NO: 655 - DNA, 25 bp, synthetic construct
  source 1..25: mol_type = other DNA
atccaacatttcatctatccaccca

SEQ ID NO: 656 - DNA, 25 bp, synthetic construct
  source 1..25: mol_type = other DNA
catccaacatttcatctatccaccc

SEQ ID NO: 657 - DNA, 25 bp, synthetic construct
  source 1..25: mol_type = other DNA
tcatccaacatttcatctatccacc

SEQ ID NO: 658 - DNA, 25 bp, synthetic construct
  source 1..25: mol_type = other DNA
ctcatccaacatttcatctatccac

SEQ ID NO: 659 - DNA, 25 bp, synthetic construct
  source 1..25: mol_type = other DNA
gctcatccaacatttcatctatcca

SEQ ID NO: 660 - DNA, 25 bp, synthetic construct
  source 1..25: mol_type = other DNA
tgctcatccaacatttcatctatcc

SEQ ID NO: 661 - DNA, 25 bp, synthetic construct
  source 1..25: mol_type = other DNA
ctgctcatccaacatttcatctatc

SEQ ID NO: 662 - DNA, 25 bp, synthetic construct
  source 1..25: mol_type = other DNA
tctgctcatccaacatttcatctat

SEQ ID NO: 663 - DNA, 25 bp, synthetic construct
  source 1..25: mol_type = other DNA
atctgctcatccaacatttcatcta

SEQ ID NO: 664 - DNA, 25 bp, synthetic construct
  source 1..25: mol_type = other DNA
aatctgctcatccaacatttcatct

SEQ ID NO: 665 - DNA, 25 bp, synthetic construct
  source 1..25: mol_type = other DNA
taatctgctcatccaacatttcatc

SEQ ID NO: 666 - DNA, 25 bp, synthetic construct
  source 1..25: mol_type = other DNA
ttaatctgctcatccaacatttcat

SEQ ID NO: 667 - DNA, 25 bp, synthetic construct
  source 1..25: mol_type = other DNA
cttaatctgctcatccaacatttca

SEQ ID NO: 668 - DNA, 25 bp, synthetic construct
  source 1..25: mol_type = other DNA
acttaatctgctcatccaacatttc

SEQ ID NO: 669 - DNA, 25 bp, synthetic construct
  source 1..25: mol_type = other DNA
aacttaatctgctcatccaacattt

SEQ ID NO: 670 - DNA, 25 bp, synthetic construct
  source 1..25: mol_type = other DNA
caacttaatctgctcatccaacatt

SEQ ID NO: 671 - DNA, 25 bp, synthetic construct
  source 1..25: mol_type = other DNA
acaacttaatctgctcatccaacat

SEQ ID NO: 672 - DNA, 25 bp, synthetic construct
  source 1..25: mol_type = other DNA
tacaacttaatctgctcatccaaca

SEQ ID NO: 673 - DNA, 25 bp, synthetic construct
  source 1..25: mol_type = other DNA
atacaacttaatctgctcatccaac

SEQ ID NO: 674 - DNA, 25 bp, synthetic construct
  source 1..25: mol_type = other DNA
aatacaacttaatctgctcatccaa

SEQ ID NO: 675 - DNA, 25 bp, synthetic construct
  source 1..25: mol_type = other DNA
caatacaacttaatctgctcatcca

SEQ ID NO: 676 - DNA, 25 bp, synthetic construct
  source 1..25: mol_type = other DNA
ccaatacaacttaatctgctcatcc

SEQ ID NO: 677 - DNA, 25 bp, synthetic construct
  source 1..25: mol_type = other DNA
tccaatacaacttaatctgctcatc

SEQ ID NO: 678 - DNA, 25 bp, synthetic construct
  source 1..25: mol_type = other DNA
atccaatacaacttaatctgctcat

SEQ ID NO: 679 - DNA, 25 bp, synthetic construct
  source 1..25: mol_type = other DNA
catccaatacaacttaatctgctca

SEQ ID NO: 680 - DNA, 25 bp, synthetic construct
  source 1..25: mol_type = other DNA
ccatccaatacaacttaatctgctc

SEQ ID NO: 681 - DNA, 25 bp, synthetic construct
  source 1..25: mol_type = other DNA
cccatccaatacaacttaatctgct

SEQ ID NO: 682 - DNA, 25 bp, synthetic construct
  source 1..25: mol_type = other DNA
tcccatccaatacaacttaatctgc

SEQ ID NO: 683 - DNA, 25 bp, synthetic construct
  source 1..25: mol_type = other DNA
atcccatccaatacaacttaatctg

SEQ ID NO: 684 - DNA, 25 bp, synthetic construct
  source 1..25: mol_type = other DNA
catcccatccaatacaacttaatct

SEQ ID NO: 685 - DNA, 25 bp, synthetic construct
  source 1..25: mol_type = other DNA
ccatcccatccaatacaacttaatc

SEQ ID NO: 686 - DNA, 25 bp, synthetic construct
  source 1..25: mol_type = other DNA
tccatcccatccaatacaacttaat

SEQ ID NO: 687 - DNA, 25 bp, synthetic construct
  source 1..25: mol_type = other DNA
atccatcccatccaatacaacttaa

SEQ ID NO: 688 - DNA, 25 bp, synthetic construct
  source 1..25: mol_type = other DNA
catccatcccatccaatacaactta

SEQ ID NO: 689 - DNA, 25 bp, synthetic construct
  source 1..25: mol_type = other DNA
ccatccatcccatccaatacaactt

SEQ ID NO: 690 - DNA, 25 bp, synthetic construct
  source 1..25: mol_type = other DNA
tccatccatcccatccaatacaact

SEQ ID NO: 691 - DNA, 25 bp, synthetic construct
  source 1..25: mol_type = other DNA
ttccatccatcccatccaatacaac

SEQ ID NO: 692 - DNA, 25 bp, synthetic construct
  source 1..25: mol_type = other DNA
cttccatccatcccatccaatacaa

SEQ ID NO: 693 - DNA, 25 bp, synthetic construct
  source 1..25: mol_type = other DNA
acttccatccatcccatccaataca

SEQ ID NO: 694 - DNA, 25 bp, synthetic construct
  source 1..25: mol_type = other DNA
cacttccatccatcccatccaatac

SEQ ID NO: 695 - DNA, 25 bp, synthetic construct
  source 1..25: mol_type = other DNA
acacttccatccatcccatccaata

SEQ ID NO: 696 - DNA, 25 bp, synthetic construct
  source 1..25: mol_type = other DNA
cacacttccatccatcccatccaat

SEQ ID NO: 697 - DNA, 25 bp, synthetic construct
  source 1..25: mol_type = other DNA
ccacacttccatccatcccatccaa

SEQ ID NO: 698 - DNA, 25 bp, synthetic construct
  source 1..25: mol_type = other DNA
accacacttccatccatcccatcca

SEQ ID NO: 699 - DNA, 25 bp, synthetic construct
  source 1..25: mol_type = other DNA
aaccacacttccatccatcccatcc

SEQ ID NO: 700 - DNA, 25 bp, synthetic construct
  source 1..25: mol_type = other DNA
caaccacacttccatccatcccatc

SEQ ID NO: 701 - DNA, 25 bp, synthetic construct
  source 1..25: mol_type = other DNA
tcaaccacacttccatccatcccat

SEQ ID NO: 702 - DNA, 25 bp, synthetic construct
  source 1..25: mol_type = other DNA
ctcaaccacacttccatccatccca

SEQ ID NO: 703 - DNA, 25 bp, synthetic construct
  source 1..25: mol_type = other DNA
actcaaccacacttccatccatccc

SEQ ID NO: 704 - DNA, 25 bp, synthetic construct
  source 1..25: mol_type = other DNA
aactcaaccacacttccatccatcc

SEQ ID NO: 705 - DNA, 25 bp, synthetic construct
  source 1..25: mol_type = other DNA
taactcaaccacacttccatccatc

SEQ ID NO: 706 - DNA, 25 bp, synthetic construct
  source 1..25: mol_type = other DNA
ataactcaaccacacttccatccat

SEQ ID NO: 707 - DNA, 25 bp, synthetic construct
  source 1..25: mol_type = other DNA
aataactcaaccacacttccatcca

SEQ ID NO: 708 - DNA, 25 bp, synthetic construct
  source 1..25: mol_type = other DNA
taataactcaaccacacttccatcc

SEQ ID NO: 709 - DNA, 25 bp, synthetic construct
  source 1..25: mol_type = other DNA
ctaataactcaaccacacttccatc

SEQ ID NO: 710 - DNA, 25 bp, synthetic construct
  source 1..25: mol_type = other DNA
tctaataactcaaccacacttccat

SEQ ID NO: 711 - DNA, 25 bp, synthetic construct
  source 1..25: mol_type = other DNA
ttctaataactcaaccacacttcca

SEQ ID NO: 712 - DNA, 25 bp, synthetic construct
  source 1..25: mol_type = other DNA
cttctaataactcaaccacacttcc

SEQ ID NO: 713 - DNA, 25 bp, synthetic construct
  source 1..25: mol_type = other DNA
ccttctaataactcaaccacacttc

SEQ ID NO: 714 - DNA, 25 bp, synthetic construct
  source 1..25: mol_type = other DNA
tccttctaataactcaaccacactt

SEQ ID NO: 715 - DNA, 25 bp, synthetic construct
  source 1..25: mol_type = other DNA
ttccttctaataactcaaccacact

SEQ ID NO: 716 - DNA, 25 bp, synthetic construct
  source 1..25: mol_type = other DNA
cttccttctaataactcaaccacac

SEQ ID NO: 717 - DNA, 25 bp, synthetic construct
  source 1..25: mol_type = other DNA
tcttccttctaataactcaaccaca

SEQ ID NO: 718 - DNA, 25 bp, synthetic construct
  source 1..25: mol_type = other DNA
atcttccttctaataactcaaccac

SEQ ID NO: 719 - DNA, 25 bp, synthetic construct
  source 1..25: mol_type = other DNA
aatcttccttctaataactcaacca

SEQ ID NO: 720 - DNA, 25 bp, synthetic construct
  source 1..25: mol_type = other DNA
caatcttccttctaataactcaacc

SEQ ID NO: 721 - DNA, 25 bp, synthetic construct
  source 1..25: mol_type = other DNA
tcaatcttccttctaataactcaac

SEQ ID NO: 722 - DNA, 25 bp, synthetic construct
  source 1..25: mol_type = other DNA
ctcaatcttccttctaataactcaa

SEQ ID NO: 723 - DNA, 25 bp, synthetic construct
  source 1..25: mol_type = other DNA
actcaatcttccttctaataactca

SEQ ID NO: 724 - DNA, 25 bp, synthetic construct
  source 1..25: mol_type = other DNA
tactcaatcttccttctaataactc

SEQ ID NO: 725 - DNA, 25 bp, synthetic construct
  source 1..25: mol_type = other DNA
ctactcaatcttccttctaataact

SEQ ID NO: 726 - DNA, 25 bp, synthetic construct
  source 1..25: mol_type = other DNA
tctactcaatcttccttctaataac

SEQ ID NO: 727 - DNA, 25 bp, synthetic construct
  source 1..25: mol_type = other DNA
atctactcaatcttccttctaataa

SEQ ID NO: 728 - DNA, 25 bp, synthetic construct
  source 1..25: mol_type = other DNA
tatctactcaatcttccttctaata

SEQ ID NO: 729 - DNA, 25 bp, synthetic construct
  source 1..25: mol_type = other DNA
ctatctactcaatcttccttctaat

SEQ ID NO: 730 - DNA, 25 bp, synthetic construct
  source 1..25: mol_type = other DNA
cctatctactcaatcttccttctaa

SEQ ID NO: 731 - DNA, 25 bp, synthetic construct
  source 1..25: mol_type = other DNA
acctatctactcaatcttccttcta

SEQ ID NO: 732 - DNA, 25 bp, synthetic construct
  source 1..25: mol_type = other DNA
cacctatctactcaatcttccttct

SEQ ID NO: 733 - DNA, 25 bp, synthetic construct
  source 1..25: mol_type = other DNA
tcacctatctactcaatcttccttc

SEQ ID NO: 734 - DNA, 25 bp, synthetic construct
  source 1..25: mol_type = other DNA
ttcacctatctactcaatcttcctt

SEQ ID NO: 735 - DNA, 25 bp, synthetic construct
  source 1..25: mol_type = other DNA
attcacctatctactcaatcttcct

SEQ ID NO: 736 - DNA, 25 bp, synthetic construct
  source 1..25: mol_type = other DNA
aattcacctatctactcaatcttcc

SEQ ID NO: 737 - DNA, 25 bp, synthetic construct
  source 1..25: mol_type = other DNA
aaattcacctatctactcaatcttc

SEQ ID NO: 738 - DNA, 25 bp, synthetic construct
  source 1..25: mol_type = other DNA
caaattcacctatctactcaatctt

SEQ ID NO: 739 - DNA, 25 bp, synthetic construct
  source 1..25: mol_type = other DNA
acaaattcacctatctactcaatct

SEQ ID NO: 740 - DNA, 25 bp, synthetic construct
  source 1..25: mol_type = other DNA
aacaaattcacctatctactcaatc

SEQ ID NO: 741 - DNA, 25 bp, synthetic construct
  source 1..25: mol_type = other DNA
caacaaattcacctatctactcaat

SEQ ID NO: 742 - DNA, 25 bp, synthetic construct
  source 1..25: mol_type = other DNA
tcaacaaattcacctatctactcaa

SEQ ID NO: 743 - DNA, 25 bp, synthetic construct
  source 1..25: mol_type = other DNA
atcaacaaattcacctatctactca

SEQ ID NO: 744 - DNA, 25 bp, synthetic construct
  source 1..25: mol_type = other DNA
tatcaacaaattcacctatctactc

SEQ ID NO: 745 - DNA, 25 bp, synthetic construct
  source 1..25: mol_type = other DNA
ctatcaacaaattcacctatctact

SEQ ID NO: 746 - DNA, 25 bp, synthetic construct
  source 1..25: mol_type = other DNA
actatcaacaaattcacctatctac

SEQ ID NO: 747 - DNA, 25 bp, synthetic construct
  source 1..25: mol_type = other DNA
gactatcaacaaattcacctatcta

SEQ ID NO: 748 - DNA, 25 bp, synthetic construct
  source 1..25: mol_type = other DNA
tgactatcaacaaattcacctatct

SEQ ID NO: 749 - DNA, 25 bp, synthetic construct
  source 1..25: mol_type = other DNA
ctgactatcaacaaattcacctatc

SEQ ID NO: 750 - DNA, 25 bp, synthetic construct
  source 1..25: mol_type = other DNA
tctgactatcaacaaattcacctat

SEQ ID NO: 751 - DNA, 25 bp, synthetic construct
  source 1..25: mol_type = other DNA
atctgactatcaacaaattcaccta

SEQ ID NO: 752 - DNA, 25 bp, synthetic construct
  source 1..25: mol_type = other DNA
catctgactatcaacaaattcacct

SEQ ID NO: 753 - DNA, 25 bp, synthetic construct
  source 1..25: mol_type = other DNA
ccatctgactatcaacaaattcacc

SEQ ID NO: 754 - DNA, 25 bp, synthetic construct
  source 1..25: mol_type = other DNA
cccatctgactatcaacaaattcac

SEQ ID NO: 755 - DNA, 25 bp, synthetic construct
  source 1..25: mol_type = other DNA
acccatctgactatcaacaaattca

SEQ ID NO: 756 - DNA, 25 bp, synthetic construct
  source 1..25: mol_type = other DNA
tacccatctgactatcaacaaattc

SEQ ID NO: 757 - DNA, 25 bp, synthetic construct
  source 1..25: mol_type = other DNA
ctacccatctgactatcaacaaatt

SEQ ID NO: 758 - DNA, 25 bp, synthetic construct
  source 1..25: mol_type = other DNA
tctacccatctgactatcaacaaat

SEQ ID NO: 759 - DNA, 25 bp, synthetic construct
  source 1..25: mol_type = other DNA
atctacccatctgactatcaacaaa

SEQ ID NO: 760 - DNA, 25 bp, synthetic construct
  source 1..25: mol_type = other DNA
tatctacccatctgactatcaacaa

SEQ ID NO: 761 - DNA, 25 bp, synthetic construct
  source 1..25: mol_type = other DNA
ctatctacccatctgactatcaaca

SEQ ID NO: 762 - DNA, 25 bp, synthetic construct
  source 1..25: mol_type = other DNA
cctatctacccatctgactatcaac

SEQ ID NO: 763 - DNA, 25 bp, synthetic construct
  source 1..25: mol_type = other DNA
acctatctacccatctgactatcaa

SEQ ID NO: 764 - DNA, 25 bp, synthetic construct
  source 1..25: mol_type = other DNA
tacctatctacccatctgactatca

SEQ ID NO: 765 - DNA, 25 bp, synthetic construct
  source 1..25: mol_type = other DNA
ctacctatctacccatctgactatc

SEQ ID NO: 766 - DNA, 25 bp, synthetic construct
  source 1..25: mol_type = other DNA
tctacctatctacccatctgactat

SEQ ID NO: 767 - DNA, 25 bp, synthetic construct
  source 1..25: mol_type = other DNA
atctacctatctacccatctgacta

SEQ ID NO: 768 - DNA, 25 bp, synthetic construct
  source 1..25: mol_type = other DNA
catctacctatctacccatctgact

SEQ ID NO: 769 - DNA, 25 bp, synthetic construct
  source 1..25: mol_type = other DNA
ccatctacctatctacccatctgac

SEQ ID NO: 770 - DNA, 25 bp, synthetic construct
  source 1..25: mol_type = other DNA
tccatctacctatctacccatctga

SEQ ID NO: 771 - DNA, 25 bp, synthetic construct
  source 1..25: mol_type = other DNA
atccatctacctatctacccatctg

SEQ ID NO: 772 - DNA, 25 bp, synthetic construct
  source 1..25: mol_type = other DNA
catccatctacctatctacccatct

SEQ ID NO: 773 - DNA, 25 bp, synthetic construct
  source 1..25: mol_type = other DNA
ccatccatctacctatctacccatc

SEQ ID NO: 774 - DNA, 25 bp, synthetic construct
  source 1..25: mol_type = other DNA
tccatccatctacctatctacccat

SEQ ID NO: 775 - DNA, 25 bp, synthetic construct
  source 1..25: mol_type = other DNA
atccatccatctacctatctaccca

SEQ ID NO: 776 - DNA, 25 bp, synthetic construct
  source 1..25: mol_type = other DNA
catccatccatctacctatctaccc

SEQ ID NO: 777 - DNA, 25 bp, synthetic construct
  source 1..25: mol_type = other DNA
ccatccatccatctacctatctacc

SEQ ID NO: 778 - DNA, 25 bp, synthetic construct
  source 1..25: mol_type = other DNA
tccatccatccatctacctatctac

SEQ ID NO: 779 - DNA, 25 bp, synthetic construct
  source 1..25: mol_type = other DNA
atccatccatccatctacctatcta

SEQ ID NO: 780 - DNA, 25 bp, synthetic construct
  source 1..25: mol_type = other DNA
catccatccatccatctacctatct

SEQ ID NO: 781 - DNA, 25 bp, synthetic construct
  source 1..25: mol_type = other DNA
ccatccatccatccatctacctatc

SEQ ID NO: 782 - DNA, 25 bp, synthetic construct
  source 1..25: mol_type = other DNA
tccatccatccatccatctacctat

SEQ ID NO: 783 - DNA, 25 bp, synthetic construct
  source 1..25: mol_type = other DNA
atccatccatccatccatctaccta

SEQ ID NO: 784 - DNA, 25 bp, synthetic construct
  source 1..25: mol_type = other DNA
catccatccatccatccatctacct

SEQ ID NO: 785 - DNA, 25 bp, synthetic construct
  source 1..25: mol_type = other DNA
ccatccatccatccatccatctacc

SEQ ID NO: 786 - DNA, 25 bp, synthetic construct
  source 1..25: mol_type = other DNA
tccatccatccatccatccatctac

SEQ ID NO: 787 - DNA, 25 bp, synthetic construct
  source 1..25: mol_type = other DNA
atccatccatccatccatccatcta

SEQ ID NO: 788 - DNA, 25 bp, synthetic construct
  source 1..25: mol_type = other DNA
catccatccatccatccatccatct

SEQ ID NO: 789 - DNA, 25 bp, synthetic construct
  source 1..25: mol_type = other DNA
acatccatccatccatccatccatc

SEQ ID NO: 790 - DNA, 25 bp, synthetic construct
  source 1..25: mol_type = other DNA
tacatccatccatccatccatccat

SEQ ID NO: 791 - DNA, 25 bp, synthetic construct
  source 1..25: mol_type = other DNA
atacatccatccatccatccatcca

SEQ ID NO: 792 - DNA, 25 bp, synthetic construct
  source 1..25: mol_type = other DNA
tatacatccatccatccatccatcc

SEQ ID NO: 793 - DNA, 25 bp, synthetic construct
  source 1..25: mol_type = other DNA
ctatacatccatccatccatccatc

SEQ ID NO: 794 - DNA, 25 bp, synthetic construct
  source 1..25: mol_type = other DNA
cctatacatccatccatccatccat

SEQ ID NO: 795 - DNA, 25 bp, synthetic construct
  source 1..25: mol_type = other DNA
gcctatacatccatccatccatcca

SEQ ID NO: 796 - DNA, 25 bp, synthetic construct
  source 1..25: mol_type = other DNA
tgcctatacatccatccatccatcc

SEQ ID NO: 797 - DNA, 25 bp, synthetic construct
  source 1..25: mol_type = other DNA
ctgcctatacatccatccatccatc

SEQ ID NO: 798 - DNA, 25 bp, synthetic construct
  source 1..25: mol_type = other DNA
tctgcctatacatccatccatccat

SEQ ID NO: 799 - DNA, 25 bp, synthetic construct
  source 1..25: mol_type = other DNA
atctgcctatacatccatccatcca

SEQ ID NO: 800 - DNA, 25 bp, synthetic construct
  source 1..25: mol_type = other DNA
catctgcctatacatccatccatcc

SEQ ID NO: 801 - DNA, 25 bp, synthetic construct
  source 1..25: mol_type = other DNA
ccatctgcctatacatccatccatc

SEQ ID NO: 802 - DNA, 25 bp, synthetic construct
  source 1..25: mol_type = other DNA
tccatctgcctatacatccatccat

SEQ ID NO: 803 - DNA, 25 bp, synthetic construct
  source 1..25: mol_type = other DNA
gtccatctgcctatacatccatcca

SEQ ID NO: 804 - DNA, 25 bp, synthetic construct
  source 1..25: mol_type = other DNA
tgtccatctgcctatacatccatcc

SEQ ID NO: 805 - DNA, 25 bp, synthetic construct
  source 1..25: mol_type = other DNA
ttgtccatctgcctatacatccatc

SEQ ID NO: 806 - DNA, 25 bp, synthetic construct
  source 1..25: mol_type = other DNA
tttgtccatctgcctatacatccat

SEQ ID NO: 807 - DNA, 25 bp, synthetic construct
  source 1..25: mol_type = other DNA
atttgtccatctgcctatacatcca

SEQ ID NO: 808 - DNA, 25 bp, synthetic construct
  source 1..25: mol_type = other DNA
catttgtccatctgcctatacatcc

SEQ ID NO: 809 - DNA, 25 bp, synthetic construct
  source 1..25: mol_type = other DNA
ccatttgtccatctgcctatacatc

SEQ ID NO: 810 - DNA, 25 bp, synthetic construct
  source 1..25: mol_type = other DNA
tccatttgtccatctgcctatacat

SEQ ID NO: 811 - DNA, 25 bp, synthetic construct
  source 1..25: mol_type = other DNA
atccatttgtccatctgcctataca

SEQ ID NO: 812 - DNA, 25 bp, synthetic construct
  source 1..25: mol_type = other DNA
catccatttgtccatctgcctatac

SEQ ID NO: 813 - DNA, 25 bp, synthetic construct
  source 1..25: mol_type = other DNA
tcatccatttgtccatctgcctata

SEQ ID NO: 814 - DNA, 25 bp, synthetic construct
  source 1..25: mol_type = other DNA
ttcatccatttgtccatctgcctat

SEQ ID NO: 815 - DNA, 25 bp, synthetic construct
  source 1..25: mol_type = other DNA
attcatccatttgtccatctgccta

SEQ ID NO: 816 - DNA, 25 bp, synthetic construct
  source 1..25: mol_type = other DNA
cattcatccatttgtccatctgcct

SEQ ID NO: 817 - DNA, 25 bp, synthetic construct
  source 1..25: mol_type = other DNA
ccattcatccatttgtccatctgcc

SEQ ID NO: 818 - DNA, 25 bp, synthetic construct
  source 1..25: mol_type = other DNA
cccattcatccatttgtccatctgc

SEQ ID NO: 819 - DNA, 25 bp, synthetic construct
  source 1..25: mol_type = other DNA
acccattcatccatttgtccatctg

SEQ ID NO: 820 - DNA, 25 bp, synthetic construct
  source 1..25: mol_type = other DNA
cacccattcatccatttgtccatct

SEQ ID NO: 821 - DNA, 25 bp, synthetic construct
  source 1..25: mol_type = other DNA
ccacccattcatccatttgtccatc

SEQ ID NO: 822 - DNA, 25 bp, synthetic construct
  source 1..25: mol_type = other DNA
cccacccattcatccatttgtccat

SEQ ID NO: 823 - DNA, 25 bp, synthetic construct
  source 1..25: mol_type = other DNA
acccacccattcatccatttgtcca

SEQ ID NO: 824 - DNA, 25 bp, synthetic construct
  source 1..25: mol_type = other DNA
cacccacccattcatccatttgtcc

SEQ ID NO: 825 - DNA, 25 bp, synthetic construct
  source 1..25: mol_type = other DNA
ccacccacccattcatccatttgtc

SEQ ID NO: 826 - DNA, 25 bp, synthetic construct
  source 1..25: mol_type = other DNA
tccacccacccattcatccatttgt

SEQ ID NO: 827 - DNA, 25 bp, synthetic construct
  source 1..25: mol_type = other DNA
atccacccacccattcatccatttg

SEQ ID NO: 828 - DNA, 25 bp, synthetic construct
  source 1..25: mol_type = other DNA
catccacccacccattcatccattt

SEQ ID NO: 829 - DNA, 25 bp, synthetic construct
  source 1..25: mol_type = other DNA
tcatccacccacccattcatccatt

SEQ ID NO: 830 - DNA, 25 bp, synthetic construct
  source 1..25: mol_type = other DNA
ttcatccacccacccattcatccat

SEQ ID NO: 831 - DNA, 25 bp, synthetic construct
  source 1..25: mol_type = other DNA
attcatccacccacccattcatcca

SEQ ID NO: 832 - DNA, 25 bp, synthetic construct
  source 1..25: mol_type = other DNA
cattcatccacccacccattcatcc

SEQ ID NO: 833 - DNA, 25 bp, synthetic construct
  source 1..25: mol_type = other DNA
ccattcatccacccacccattcatc

SEQ ID NO: 834 - DNA, 25 bp, synthetic construct
  source 1..25: mol_type = other DNA
tccattcatccacccacccattcat

SEQ ID NO: 835 - DNA, 25 bp, synthetic construct
  source 1..25: mol_type = other DNA
ttccattcatccacccacccattca

SEQ ID NO: 836 - DNA, 25 bp, synthetic construct
  source 1..25: mol_type = other DNA
cttccattcatccacccacccattc

SEQ ID NO: 837 - DNA, 25 bp, synthetic construct
  source 1..25: mol_type = other DNA
ccttccattcatccacccacccatt

SEQ ID NO: 838 - DNA, 25 bp, synthetic construct
  source 1..25: mol_type = other DNA
tccttccattcatccacccacccat

SEQ ID NO: 839 - DNA, 25 bp, synthetic construct
  source 1..25: mol_type = other DNA
atccttccattcatccacccaccca

SEQ ID NO: 840 - DNA, 25 bp, synthetic construct
  source 1..25: mol_type = other DNA
catccttccattcatccacccaccc

SEQ ID NO: 841 - DNA, 25 bp, synthetic construct
  source 1..25: mol_type = other DNA
acatccttccattcatccacccacc

SEQ ID NO: 842 - DNA, 25 bp, synthetic construct
  source 1..25: mol_type = other DNA
cacatccttccattcatccacccac

SEQ ID NO: 843 - DNA, 25 bp, synthetic construct
  source 1..25: mol_type = other DNA
acacatccttccattcatccaccca

SEQ ID NO: 844 - DNA, 25 bp, synthetic construct
  source 1..25: mol_type = other DNA
cacacatccttccattcatccaccc

SEQ ID NO: 845 - DNA, 25 bp, synthetic construct
  source 1..25: mol_type = other DNA
ccacacatccttccattcatccacc

SEQ ID NO: 846 - DNA, 25 bp, synthetic construct
  source 1..25: mol_type = other DNA
accacacatccttccattcatccac

SEQ ID NO: 847 - DNA, 25 bp, synthetic construct
  source 1..25: mol_type = other DNA
aaccacacatccttccattcatcca

SEQ ID NO: 848 - DNA, 25 bp, synthetic construct
  source 1..25: mol_type = other DNA
caaccacacatccttccattcatcc

SEQ ID NO: 849 - DNA, 25 bp, synthetic construct
  source 1..25: mol_type = other DNA
tcaaccacacatccttccattcatc

SEQ ID NO: 850 - DNA, 25 bp, synthetic construct
  source 1..25: mol_type = other DNA
ttcaaccacacatccttccattcat

SEQ ID NO: 851 - DNA, 25 bp, synthetic construct
  source 1..25: mol_type = other DNA
gttcaaccacacatccttccattca

SEQ ID NO: 852 - DNA, 25 bp, synthetic construct
  source 1..25: mol_type = other DNA
agttcaaccacacatccttccattc

SEQ ID NO: 853 - DNA, 25 bp, synthetic construct
  source 1..25: mol_type = other DNA
tagttcaaccacacatccttccatt

SEQ ID NO: 854 - DNA, 25 bp, synthetic construct
  source 1..25: mol_type = other DNA
atagttcaaccacacatccttccat

SEQ ID NO: 855 - DNA, 25 bp, synthetic construct
  source 1..25: mol_type = other DNA
aatagttcaaccacacatccttcca

SEQ ID NO: 856 - DNA, 25 bp, synthetic construct
  source 1..25: mol_type = other DNA
caatagttcaaccacacatccttcc

SEQ ID NO: 857 - DNA, 25 bp, synthetic construct
  source 1..25: mol_type = other DNA
gcaatagttcaaccacacatccttc

SEQ ID NO: 858 - DNA, 25 bp, synthetic construct
  source 1..25: mol_type = other DNA
tgcaatagttcaaccacacatcctt

SEQ ID NO: 859 - DNA, 25 bp, synthetic construct
  source 1..25: mol_type = other DNA
ttgcaatagttcaaccacacatcct

SEQ ID NO: 860 - DNA, 25 bp, synthetic construct
  source 1..25: mol_type = other DNA
cttgcaatagttcaaccacacatcc

SEQ ID NO: 861 - DNA, 25 bp, synthetic construct
  source 1..25: mol_type = other DNA
acttgcaatagttcaaccacacatc

SEQ ID NO: 862 - DNA, 25 bp, synthetic construct
  source 1..25: mol_type = other DNA
tacttgcaatagttcaaccacacat

SEQ ID NO: 863 - DNA, 25 bp, synthetic construct
  source 1..25: mol_type = other DNA
atacttgcaatagttcaaccacaca

SEQ ID NO: 864 - DNA, 25 bp, synthetic construct
  source 1..25: mol_type = other DNA
aatacttgcaatagttcaaccacac

SEQ ID NO: 865 - DNA, 25 bp, synthetic construct
  source 1..25: mol_type = other DNA
caatacttgcaatagttcaaccaca

SEQ ID NO: 866 - DNA, 25 bp, synthetic construct
  source 1..25: mol_type = other DNA
tcaatacttgcaatagttcaaccac

SEQ ID NO: 867 - DNA, 25 bp, synthetic construct
  source 1..25: mol_type = other DNA
atcaatacttgcaatagttcaacca

SEQ ID NO: 868 - DNA, 25 bp, synthetic construct
  source 1..25: mol_type = other DNA
tatcaatacttgcaatagttcaacc

SEQ ID NO: 869 - DNA, 25 bp, synthetic construct
  source 1..25: mol_type = other DNA
ttatcaatacttgcaatagttcaac

SEQ ID NO: 870 - DNA, 25 bp, synthetic construct
  source 1..25: mol_type = other DNA
attatcaatacttgcaatagttcaa

SEQ ID NO: 871 - DNA, 25 bp, synthetic construct
  source 1..25: mol_type = other DNA
aattatcaatacttgcaatagttca

SEQ ID NO: 872 - DNA, 25 bp, synthetic construct
  source 1..25: mol_type = other DNA
caattatcaatacttgcaatagttc

SEQ ID NO: 873 - DNA, 25 bp, synthetic construct
  source 1..25: mol_type = other DNA
ccaattatcaatacttgcaatagtt

SEQ ID NO: 874 - DNA, 25 bp, synthetic construct
  source 1..25: mol_type = other DNA
cccaattatcaatacttgcaatagt

SEQ ID NO: 875 - DNA, 25 bp, synthetic construct
  source 1..25: mol_type = other DNA
acccaattatcaatacttgcaatag

SEQ ID NO: 876 - DNA, 25 bp, synthetic construct
  source 1..25: mol_type = other DNA
aacccaattatcaatacttgcaata

SEQ ID NO: 877 - DNA, 25 bp, synthetic construct
  source 1..25: mol_type = other DNA
gaacccaattatcaatacttgcaat

SEQ ID NO: 878 - DNA, 25 bp, synthetic construct
  source 1..25: mol_type = other DNA
tgaacccaattatcaatacttgcaa

SEQ ID NO: 879 - DNA, 25 bp, synthetic construct
  source 1..25: mol_type = other DNA
atgaacccaattatcaatacttgca

SEQ ID NO: 880 - DNA, 25 bp, synthetic construct
  source 1..25: mol_type = other DNA
tatgaacccaattatcaatacttgc

SEQ ID NO: 881 - DNA, 25 bp, synthetic construct
  source 1..25: mol_type = other DNA
ttatgaacccaattatcaatacttg

SEQ ID NO: 882 - DNA, 25 bp, synthetic construct
  source 1..25: mol_type = other DNA
attatgaacccaattatcaatactt

SEQ ID NO: 883 - DNA, 25 bp, synthetic construct
  source 1..25: mol_type = other DNA
aattatgaacccaattatcaatact

SEQ ID NO: 884 - DNA, 25 bp, synthetic construct
  source 1..25: mol_type = other DNA
aaattatgaacccaattatcaatac

SEQ ID NO: 885 - DNA, 25 bp, synthetic construct
  source 1..25: mol_type = other DNA
gaaattatgaacccaattatcaata

SEQ ID NO: 886 - DNA, 25 bp, synthetic construct
  source 1..25: mol_type = other DNA
agaaattatgaacccaattatcaat

SEQ ID NO: 887 - DNA, 25 bp, synthetic construct
  source 1..25: mol_type = other DNA
cagaaattatgaacccaattatcaa

SEQ ID NO: 888 - DNA, 25 bp, synthetic construct
  source 1..25: mol_type = other DNA
tcagaaattatgaacccaattatca

SEQ ID NO: 889 - DNA, 25 bp, synthetic construct
  source 1..25: mol_type = other DNA
ttcagaaattatgaacccaattatc

SEQ ID NO: 890 - DNA, 25 bp, synthetic construct
  source 1..25: mol_type = other DNA
attcagaaattatgaacccaattat

SEQ ID NO: 891 - DNA, 25 bp, synthetic construct
  source 1..25: mol_type = other DNA
tattcagaaattatgaacccaatta

SEQ ID NO: 892 - DNA, 25 bp, synthetic construct
  source 1..25: mol_type = other DNA
atattcagaaattatgaacccaatt

SEQ ID NO: 893 - DNA, 25 bp, synthetic construct
  source 1..25: mol_type = other DNA
aatattcagaaattatgaacccaat

SEQ ID NO: 894 - DNA, 25 bp, synthetic construct
  source 1..25: mol_type = other DNA
aaatattcagaaattatgaacccaa

SEQ ID NO: 895 - DNA, 25 bp, synthetic construct
  source 1..25: mol_type = other DNA
taaatattcagaaattatgaaccca

SEQ ID NO: 896 - DNA, 25 bp, synthetic construct
  source 1..25: mol_type = other DNA
ctaaatattcagaaattatgaaccc

SEQ ID NO: 897 - DNA, 25 bp, synthetic construct
  source 1..25: mol_type = other DNA
tctaaatattcagaaattatgaacc

SEQ ID NO: 898 - DNA, 25 bp, synthetic construct
  source 1..25: mol_type = other DNA
atctaaatattcagaaattatgaac

SEQ ID NO: 899 - DNA, 25 bp, synthetic construct
  source 1..25: mol_type = other DNA
catctaaatattcagaaattatgaa

SEQ ID NO: 900 - DNA, 25 bp, synthetic construct
  source 1..25: mol_type = other DNA
ccatctaaatattcagaaattatga

SEQ ID NO: 901 - DNA, 25 bp, synthetic construct
  source 1..25: mol_type = other DNA
tccatctaaatattcagaaattatg

SEQ ID NO: 902 - DNA, 25 bp, synthetic construct
  source 1..25: mol_type = other DNA
atccatctaaatattcagaaattat

SEQ ID NO: 903 - DNA, 25 bp, synthetic construct
  source 1..25: mol_type = other DNA
catccatctaaatattcagaaatta

SEQ ID NO: 904 - DNA, 25 bp, synthetic construct
  source 1..25: mol_type = other DNA
ccatccatctaaatattcagaaatt

SEQ ID NO: 905 - DNA, 25 bp, synthetic construct
  source 1..25: mol_type = other DNA
accatccatctaaatattcagaaat

SEQ ID NO: 906 - DNA, 25 bp, synthetic construct
  source 1..25: mol_type = other DNA
aaccatccatctaaatattcagaaa

SEQ ID NO: 907 - DNA, 25 bp, synthetic construct
  source 1..25: mol_type = other DNA
caaccatccatctaaatattcagaa

SEQ ID NO: 908 - DNA, 25 bp, synthetic construct
  source 1..25: mol_type = other DNA
acaaccatccatctaaatattcaga

SEQ ID NO: 909 - DNA, 25 bp, synthetic construct
  source 1..25: mol_type = other DNA
cacaaccatccatctaaatattcag

SEQ ID NO: 910 - DNA, 25 bp, synthetic construct
  source 1..25: mol_type = other DNA
tcacaaccatccatctaaatattca

SEQ ID NO: 911 - DNA, 25 bp, synthetic construct
  source 1..25: mol_type = other DNA
ctcacaaccatccatctaaatattc

SEQ ID NO: 912 - DNA, 25 bp, synthetic construct
  source 1..25: mol_type = other DNA
actcacaaccatccatctaaatatt

SEQ ID NO: 913 - DNA, 25 bp, synthetic construct
  source 1..25: mol_type = other DNA
cactcacaaccatccatctaaatat

SEQ ID NO: 914 - DNA, 25 bp, synthetic construct
  source 1..25: mol_type = other DNA
ccactcacaaccatccatctaaata

SEQ ID NO: 915 - DNA, 25 bp, synthetic construct
  source 1..25: mol_type = other DNA
gccactcacaaccatccatctaaat

SEQ ID NO: 916 - DNA, 25 bp, synthetic construct
  source 1..25: mol_type = other DNA
agccactcacaaccatccatctaaa

SEQ ID NO: 917 - DNA, 25 bp, synthetic construct
  source 1..25: mol_type = other DNA
cagccactcacaaccatccatctaa

SEQ ID NO: 918 - DNA, 25 bp, synthetic construct
  source 1..25: mol_type = other DNA
ccagccactcacaaccatccatcta

SEQ ID NO: 919 - DNA, 25 bp, synthetic construct
  source 1..25: mol_type = other DNA
accagccactcacaaccatccatct

SEQ ID NO: 920 - DNA, 25 bp, synthetic construct
  source 1..25: mol_type = other DNA
caccagccactcacaaccatccatc

SEQ ID NO: 921 - DNA, 25 bp, synthetic construct
  source 1..25: mol_type = other DNA
ccaccagccactcacaaccatccat

SEQ ID NO: 922 - DNA, 25 bp, synthetic construct
  source 1..25: mol_type = other DNA
tccaccagccactcacaaccatcca

SEQ ID NO: 923 - DNA, 25 bp, synthetic construct
  source 1..25: mol_type = other DNA
gtccaccagccactcacaaccatcc

SEQ ID NO: 924 - DNA, 25 bp, synthetic construct
  source 1..25: mol_type = other DNA
tgtccaccagccactcacaaccatc

SEQ ID NO: 925 - DNA, 25 bp, synthetic construct
  source 1..25: mol_type = other DNA
ctgtccaccagccactcacaaccat

SEQ ID NO: 926 - DNA, 25 bp, synthetic construct
  source 1..25: mol_type = other DNA
tctgtccaccagccactcacaacca

SEQ ID NO: 927 - DNA, 25 bp, synthetic construct
  source 1..25: mol_type = other DNA
gtctgtccaccagccactcacaacc

SEQ ID NO: 928 - DNA, 25 bp, synthetic construct
  source 1..25: mol_type = other DNA
cgtctgtccaccagccactcacaac

SEQ ID NO: 929 - DNA, 25 bp, synthetic construct
  source 1..25: mol_type = other DNA
tcgtctgtccaccagccactcacaa

SEQ ID NO: 930 - DNA, 25 bp, synthetic construct
  source 1..25: mol_type = other DNA
ttcgtctgtccaccagccactcaca

SEQ ID NO: 931 - DNA, 25 bp, synthetic construct
  source 1..25: mol_type = other DNA
tttcgtctgtccaccagccactcac

SEQ ID NO: 932 - DNA, 25 bp, synthetic construct
  source 1..25: mol_type = other DNA
ttttcgtctgtccaccagccactca

SEQ ID NO: 933 - DNA, 25 bp, synthetic construct
  source 1..25: mol_type = other DNA
tttttcgtctgtccaccagccactc

SEQ ID NO: 934 - DNA, 25 bp, synthetic construct
  source 1..25: mol_type = other DNA
atttttcgtctgtccaccagccact

SEQ ID NO: 935 - DNA, 25 bp, synthetic construct
  source 1..25: mol_type = other DNA
catttttcgtctgtccaccagccac

SEQ ID NO: 936 - DNA, 25 bp, synthetic construct
  source 1..25: mol_type = other DNA
ccatttttcgtctgtccaccagcca

SEQ ID NO: 937 - DNA, 25 bp, synthetic construct
  source 1..25: mol_type = other DNA
tccatttttcgtctgtccaccagcc

SEQ ID NO: 938 - DNA, 25 bp, synthetic construct
  source 1..25: mol_type = other DNA
atccatttttcgtctgtccaccagc

SEQ ID NO: 939 - DNA, 25 bp, synthetic construct
  source 1..25: mol_type = other DNA
catccatttttcgtctgtccaccag

SEQ ID NO: 940 - DNA, 25 bp, synthetic construct
  source 1..25: mol_type = other DNA
ccatccatttttcgtctgtccacca

SEQ ID NO: 941 - DNA, 25 bp, synthetic construct
  source 1..25: mol_type = other DNA
accatccatttttcgtctgtccacc

SEQ ID NO: 942 - DNA, 25 bp, synthetic construct
  source 1..25: mol_type = other DNA
aaccatccatttttcgtctgtccac

SEQ ID NO: 943 - DNA, 25 bp, synthetic construct
  source 1..25: mol_type = other DNA
caaccatccatttttcgtctgtcca

SEQ ID NO: 944 - DNA, 25 bp, synthetic construct
  source 1..25: mol_type = other DNA
ccaaccatccatttttcgtctgtcc

SEQ ID NO: 945 - DNA, 25 bp, synthetic construct
  source 1..25: mol_type = other DNA
tccaaccatccatttttcgtctgtc

SEQ ID NO: 946 - DNA, 25 bp, synthetic construct
  source 1..25: mol_type = other DNA
atccaaccatccatttttcgtctgt

SEQ ID NO: 947 - DNA, 25 bp, synthetic construct
  source 1..25: mol_type = other DNA
tatccaaccatccatttttcgtctg

SEQ ID NO: 948 - DNA, 25 bp, synthetic construct
  source 1..25: mol_type = other DNA
ttatccaaccatccatttttcgtct

SEQ ID NO: 949 - DNA, 25 bp, synthetic construct
  source 1..25: mol_type = other DNA
tttatccaaccatccatttttcgtc

SEQ ID NO: 950 - DNA, 25 bp, synthetic construct
  source 1..25: mol_type = other DNA
atttatccaaccatccatttttcgt

SEQ ID NO: 951 - DNA, 25 bp, synthetic construct
  source 1..25: mol_type = other DNA
aatttatccaaccatccatttttcg

SEQ ID NO: 952 - DNA, 25 bp, synthetic construct
  source 1..25: mol_type = other DNA
caatttatccaaccatccatttttc

SEQ ID NO: 953 - DNA, 25 bp, synthetic construct
  source 1..25: mol_type = other DNA
tcaatttatccaaccatccattttt

SEQ ID NO: 954 - DNA, 25 bp, synthetic construct
  source 1..25: mol_type = other DNA
atcaatttatccaaccatccatttt

SEQ ID NO: 955 - DNA, 25 bp, synthetic construct
  source 1..25: mol_type = other DNA
catcaatttatccaaccatccattt

SEQ ID NO: 956 - DNA, 25 bp, synthetic construct
  source 1..25: mol_type = other DNA
ccatcaatttatccaaccatccatt

SEQ ID NO: 957 - DNA, 25 bp, synthetic construct
  source 1..25: mol_type = other DNA
cccatcaatttatccaaccatccat

SEQ ID NO: 958 - DNA, 25 bp, synthetic construct
  source 1..25: mol_type = other DNA
acccatcaatttatccaaccatcca

SEQ ID NO: 959 - DNA, 25 bp, synthetic construct
  source 1..25: mol_type = other DNA
cacccatcaatttatccaaccatcc

SEQ ID NO: 960 - DNA, 25 bp, synthetic construct
  source 1..25: mol_type = other DNA
ccacccatcaatttatccaaccatc

SEQ ID NO: 961 - DNA, 25 bp, synthetic construct
  source 1..25: mol_type = other DNA
tccacccatcaatttatccaaccat

SEQ ID NO: 962 - DNA, 25 bp, synthetic construct
  source 1..25: mol_type = other DNA
atccacccatcaatttatccaacca

SEQ ID NO: 963 - DNA, 25 bp, synthetic construct
  source 1..25: mol_type = other DNA
catccacccatcaatttatccaacc

SEQ ID NO: 964 - DNA, 25 bp, synthetic construct
  source 1..25: mol_type = other DNA
ccatccacccatcaatttatccaac

SEQ ID NO: 965 - DNA, 25 bp, synthetic construct
  source 1..25: mol_type = other DNA
tccatccacccatcaatttatccaa

SEQ ID NO: 966 - DNA, 25 bp, synthetic construct
  source 1..25: mol_type = other DNA
atccatccacccatcaatttatcca

SEQ ID NO: 967 - DNA, 25 bp, synthetic construct
  source 1..25: mol_type = other DNA
catccatccacccatcaatttatcc

SEQ ID NO: 968 - DNA, 25 bp, synthetic construct
  source 1..25: mol_type = other DNA
ccatccatccacccatcaatttatc

SEQ ID NO: 969 - DNA, 25 bp, synthetic construct
  source 1..25: mol_type = other DNA
accatccatccacccatcaatttat

SEQ ID NO: 970 - DNA, 25 bp, synthetic construct
  source 1..25: mol_type = other DNA
aaccatccatccacccatcaattta

SEQ ID NO: 971 - DNA, 25 bp, synthetic construct
  source 1..25: mol_type = other DNA
caaccatccatccacccatcaattt

SEQ ID NO: 972 - DNA, 25 bp, synthetic construct
  source 1..25: mol_type = other DNA
ccaaccatccatccacccatcaatt

SEQ ID NO: 973 - DNA, 25 bp, synthetic construct
  source 1..25: mol_type = other DNA
accaaccatccatccacccatcaat

SEQ ID NO: 974 - DNA, 25 bp, synthetic construct
  source 1..25: mol_type = other DNA
aaccaaccatccatccacccatcaa

SEQ ID NO: 975 - DNA, 25 bp, synthetic construct
  source 1..25: mol_type = other DNA
caaccaaccatccatccacccatca

SEQ ID NO: 976 - DNA, 25 bp, synthetic construct
  source 1..25: mol_type = other DNA
acaaccaaccatccatccacccatc

SEQ ID NO: 977 - DNA, 25 bp, synthetic construct
  source 1..25: mol_type = other DNA
tacaaccaaccatccatccacccat

SEQ ID NO: 978 - DNA, 25 bp, synthetic construct
  source 1..25: mol_type = other DNA
atacaaccaaccatccatccaccca

SEQ ID NO: 979 - DNA, 25 bp, synthetic construct
  source 1..25: mol_type = other DNA
catacaaccaaccatccatccaccc

SEQ ID NO: 980 - DNA, 25 bp, synthetic construct
  source 1..25: mol_type = other DNA
tcatacaaccaaccatccatccacc

SEQ ID NO: 981 - DNA, 25 bp, synthetic construct
  source 1..25: mol_type = other DNA
ttcatacaaccaaccatccatccac

SEQ ID NO: 982 - DNA, 25 bp, synthetic construct
  source 1..25: mol_type = other DNA
tttcatacaaccaaccatccatcca

SEQ ID NO: 983 - DNA, 25 bp, synthetic construct
  source 1..25: mol_type = other DNA
ctttcatacaaccaaccatccatcc

SEQ ID NO: 984 - DNA, 25 bp, synthetic construct
  source 1..25: mol_type = other DNA
tctttcatacaaccaaccatccatc

SEQ ID NO: 985 - DNA, 25 bp, synthetic construct
  source 1..25: mol_type = other DNA
ttctttcatacaaccaaccatccat

SEQ ID NO: 986 - DNA, 25 bp, synthetic construct
  source 1..25: mol_type = other DNA
attctttcatacaaccaaccatcca

SEQ ID NO: 987 - DNA, 25 bp, synthetic construct
  source 1..25: mol_type = other DNA
cattctttcatacaaccaaccatcc

SEQ ID NO: 988 - DNA, 25 bp, synthetic construct
  source 1..25: mol_type = other DNA
tcattctttcatacaaccaaccatc

SEQ ID NO: 989 - DNA, 25 bp, synthetic construct
  source 1..25: mol_type = other DNA
ttcattctttcatacaaccaaccat

SEQ ID NO: 990 - DNA, 25 bp, synthetic construct
  source 1..25: mol_type = other DNA
attcattctttcatacaaccaacca

SEQ ID NO: 991 - DNA, 25 bp, synthetic construct
  source 1..25: mol_type = other DNA
cattcattctttcatacaaccaacc

SEQ ID NO: 992 - DNA, 25 bp, synthetic construct
  source 1..25: mol_type = other DNA
tcattcattctttcatacaaccaac

SEQ ID NO: 993 - DNA, 25 bp, synthetic construct
  source 1..25: mol_type = other DNA
atcattcattctttcatacaaccaa

SEQ ID NO: 994 - DNA, 25 bp, synthetic construct
  source 1..25: mol_type = other DNA
aatcattcattctttcatacaacca

SEQ ID NO: 995 - DNA, 25 bp, synthetic construct
  source 1..25: mol_type = other DNA
caatcattcattctttcatacaacc

SEQ ID NO: 996 - DNA, 25 bp, synthetic construct
  source 1..25: mol_type = other DNA
ccaatcattcattctttcatacaac

SEQ ID NO: 997 - DNA, 25 bp, synthetic construct
  source 1..25: mol_type = other DNA
cccaatcattcattctttcatacaa

SEQ ID NO: 998 - DNA, 25 bp, synthetic construct
  source 1..25: mol_type = other DNA
acccaatcattcattctttcataca

SEQ ID NO: 999 - DNA, 25 bp, synthetic construct
  source 1..25: mol_type = other DNA
tacccaatcattcattctttcatac

SEQ ID NO: 1000 - DNA, 25 bp, synthetic construct
  source 1..25: mol_type = other DNA
ctacccaatcattcattctttcata

SEQ ID NO: 1001 - DNA, 25 bp, synthetic construct
  source 1..25: mol_type = other DNA
cctacccaatcattcattctttcat

SEQ ID NO: 1002 - DNA, 25 bp, synthetic construct
  source 1..25: mol_type = other DNA
acctacccaatcattcattctttca

SEQ ID NO: 1003 - DNA, 25 bp, synthetic construct
  source 1..25: mol_type = other DNA
cacctacccaatcattcattctttc

SEQ ID NO: 1004 - DNA, 25 bp, synthetic construct
  source 1..25: mol_type = other DNA
ccacctacccaatcattcattcttt

SEQ ID NO: 1005 - DNA, 25 bp, synthetic construct
  source 1..25: mol_type = other DNA
tccacctacccaatcattcattctt

SEQ ID NO: 1006 - DNA, 25 bp, synthetic construct
  source 1..25: mol_type = other DNA
atccacctacccaatcattcattct

SEQ ID NO: 1007 - DNA, 25 bp, synthetic construct
  source 1..25: mol_type = other DNA
aatccacctacccaatcattcattc

SEQ ID NO: 1008 - DNA, 25 bp, synthetic construct
  source 1..25: mol_type = other DNA
taatccacctacccaatcattcatt

SEQ ID NO: 1009 - DNA, 25 bp, synthetic construct
  source 1..25: mol_type = other DNA
ttaatccacctacccaatcattcat

SEQ ID NO: 1010 - DNA, 25 bp, synthetic construct
  source 1..25: mol_type = other DNA
cttaatccacctacccaatcattca

SEQ ID NO: 1011 - DNA, 25 bp, synthetic construct
  source 1..25: mol_type = other DNA
acttaatccacctacccaatcattc

SEQ ID NO: 1012 - DNA, 25 bp, synthetic construct
  source 1..25: mol_type = other DNA
aacttaatccacctacccaatcatt

SEQ ID NO: 1013 - DNA, 25 bp, synthetic construct
  source 1..25: mol_type = other DNA
caacttaatccacctacccaatcat

SEQ ID NO: 1014 - DNA, 25 bp, synthetic construct
  source 1..25: mol_type = other DNA
gcaacttaatccacctacccaatca

SEQ ID NO: 1015 - DNA, 25 bp, synthetic construct
  source 1..25: mol_type = other DNA
cgcaacttaatccacctacccaatc

SEQ ID NO: 1016 - DNA, 25 bp, synthetic construct
  source 1..25: mol_type = other DNA
ccgcaacttaatccacctacccaat

SEQ ID NO: 1017 - DNA, 25 bp, synthetic construct
  source 1..25: mol_type = other DNA
tccgcaacttaatccacctacccaa

SEQ ID NO: 1018 - DNA, 25 bp, synthetic construct
  source 1..25: mol_type = other DNA
atccgcaacttaatccacctaccca

SEQ ID NO: 1019 - DNA, 25 bp, synthetic construct
  source 1..25: mol_type = other DNA
gatccgcaacttaatccacctaccc

SEQ ID NO: 1020 - DNA, 25 bp, synthetic construct
  source 1..25: mol_type = other DNA
tgatccgcaacttaatccacctacc

SEQ ID NO: 1021 - DNA, 25 bp, synthetic construct
  source 1..25: mol_type = other DNA
ttgatccgcaacttaatccacctac

SEQ ID NO: 1022 - DNA, 25 bp, synthetic construct
  source 1..25: mol_type = other DNA
attgatccgcaacttaatccaccta

SEQ ID NO: 1023 - DNA, 25 bp, synthetic construct
  source 1..25: mol_type = other DNA
cattgatccgcaacttaatccacct

SEQ ID NO: 1024 - DNA, 25 bp, synthetic construct
  source 1..25: mol_type = other DNA
acattgatccgcaacttaatccacc

SEQ ID NO: 1025 - DNA, 25 bp, synthetic construct
  source 1..25: mol_type = other DNA
tacattgatccgcaacttaatccac

SEQ ID NO: 1026 - DNA, 25 bp, synthetic construct
  source 1..25: mol_type = other DNA
atacattgatccgcaacttaatcca

SEQ ID NO: 1027 - DNA, 25 bp, synthetic construct
  source 1..25: mol_type = other DNA
catacattgatccgcaacttaatcc

SEQ ID NO: 1028 - DNA, 25 bp, synthetic construct
  source 1..25: mol_type = other DNA
ccatacattgatccgcaacttaatc

SEQ ID NO: 1029 - DNA, 25 bp, synthetic construct
  source 1..25: mol_type = other DNA
cccatacattgatccgcaacttaat

SEQ ID NO: 1030 - DNA, 25 bp, synthetic construct
  source 1..25: mol_type = other DNA
tcccatacattgatccgcaacttaa

SEQ ID NO: 1031 - DNA, 25 bp, synthetic construct
  source 1..25: mol_type = other DNA
atcccatacattgatccgcaactta

SEQ ID NO: 1032 - DNA, 25 bp, synthetic construct
  source 1..25: mol_type = other DNA
catcccatacattgatccgcaactt

SEQ ID NO: 1033 - DNA, 25 bp, synthetic construct
  source 1..25: mol_type = other DNA
ccatcccatacattgatccgcaact

SEQ ID NO: 1034 - DNA, 25 bp, synthetic construct
  source 1..25: mol_type = other DNA
tccatcccatacattgatccgcaac

SEQ ID NO: 1035 - DNA, 25 bp, synthetic construct
  source 1..25: mol_type = other DNA
atccatcccatacattgatccgcaa

SEQ ID NO: 1036 - DNA, 25 bp, synthetic construct
  source 1..25: mol_type = other DNA
catccatcccatacattgatccgca

SEQ ID NO: 1037 - DNA, 25 bp, synthetic construct
  source 1..25: mol_type = other DNA
tcatccatcccatacattgatccgc

SEQ ID NO: 1038 - DNA, 25 bp, synthetic construct
  source 1..25: mol_type = other DNA
ttcatccatcccatacattgatccg

SEQ ID NO: 1039 - DNA, 25 bp, synthetic construct
  source 1..25: mol_type = other DNA
attcatccatcccatacattgatcc

SEQ ID NO: 1040 - DNA, 25 bp, synthetic construct
  source 1..25: mol_type = other DNA
cattcatccatcccatacattgatc

SEQ ID NO: 1041 - DNA, 25 bp, synthetic construct
  source 1..25: mol_type = other DNA
ccattcatccatcccatacattgat

SEQ ID NO: 1042 - DNA, 25 bp, synthetic construct
  source 1..25: mol_type = other DNA
tccattcatccatcccatacattga

SEQ ID NO: 1043 - DNA, 25 bp, synthetic construct
  source 1..25: mol_type = other DNA
atccattcatccatcccatacattg

SEQ ID NO: 1044 - DNA, 25 bp, synthetic construct
  source 1..25: mol_type = other DNA
catccattcatccatcccatacatt

SEQ ID NO: 1045 - DNA, 25 bp, synthetic construct
  source 1..25: mol_type = other DNA
ccatccattcatccatcccatacat

SEQ ID NO: 1046 - DNA, 25 bp, synthetic construct
  source 1..25: mol_type = other DNA
tccatccattcatccatcccataca

SEQ ID NO: 1047 - DNA, 25 bp, synthetic construct
  source 1..25: mol_type = other DNA
atccatccattcatccatcccatac

SEQ ID NO: 1048 - DNA, 25 bp, synthetic construct
  source 1..25: mol_type = other DNA
catccatccattcatccatcccata

SEQ ID NO: 1049 - DNA, 25 bp, synthetic construct
  source 1..25: mol_type = other DNA
ccatccatccattcatccatcccat

SEQ ID NO: 1050 - DNA, 25 bp, synthetic construct
  source 1..25: mol_type = other DNA
tccatccatccattcatccatccca

SEQ ID NO: 1051 - DNA, 25 bp, synthetic construct
  source 1..25: mol_type = other DNA
atccatccatccattcatccatccc

SEQ ID NO: 1052 - DNA, 25 bp, synthetic construct
  source 1..25: mol_type = other DNA
catccatccatccattcatccatcc

SEQ ID NO: 1053 - DNA, 25 bp, synthetic construct
  source 1..25: mol_type = other DNA
ccatccatccatccattcatccatc

SEQ ID NO: 1054 - DNA, 25 bp, synthetic construct
  source 1..25: mol_type = other DNA
tccatccatccatccattcatccat

SEQ ID NO: 1055 - DNA, 25 bp, synthetic construct
  source 1..25: mol_type = other DNA
atccatccatccatccattcatcca

SEQ ID NO: 1056 - DNA, 25 bp, synthetic construct
  source 1..25: mol_type = other DNA
catccatccatccatccattcatcc

SEQ ID NO: 1057 - DNA, 25 bp, synthetic construct
  source 1..25: mol_type = other DNA
acatccatccatccatccattcatc

SEQ ID NO: 1058 - DNA, 25 bp, synthetic construct
  source 1..25: mol_type = other DNA
cacatccatccatccatccattcat

SEQ ID NO: 1059 - DNA, 25 bp, synthetic construct
  source 1..25: mol_type = other DNA
acacatccatccatccatccattca

SEQ ID NO: 1060 - DNA, 25 bp, synthetic construct
  source 1..25: mol_type = other DNA
cacacatccatccatccatccattc

SEQ ID NO: 1061 - DNA, 25 bp, synthetic construct
  source 1..25: mol_type = other DNA
ccacacatccatccatccatccatt

SEQ ID NO: 1062 - DNA, 25 bp, synthetic construct
  source 1..25: mol_type = other DNA
accacacatccatccatccatccat

SEQ ID NO: 1063 - DNA, 25 bp, synthetic construct
  source 1..25: mol_type = other DNA
aaccacacatccatccatccatcca

SEQ ID NO: 1064 - DNA, 25 bp, synthetic construct
  source 1..25: mol_type = other DNA
caaccacacatccatccatccatcc

SEQ ID NO: 1065 - DNA, 25 bp, synthetic construct
  source 1..25: mol_type = other DNA
tcaaccacacatccatccatccatc

SEQ ID NO: 1066 - DNA, 25 bp, synthetic construct
  source 1..25: mol_type = other DNA
ttcaaccacacatccatccatccat

SEQ ID NO: 1067 - DNA, 25 bp, synthetic construct
  source 1..25: mol_type = other DNA
attcaaccacacatccatccatcca

SEQ ID NO: 1068 - DNA, 25 bp, synthetic construct
  source 1..25: mol_type = other DNA
aattcaaccacacatccatccatcc

SEQ ID NO: 1069 - DNA, 25 bp, synthetic construct
  source 1..25: mol_type = other DNA
taattcaaccacacatccatccatc

SEQ ID NO: 1070 - DNA, 25 bp, synthetic construct
  source 1..25: mol_type = other DNA
gtaattcaaccacacatccatccat

SEQ ID NO: 1071 - DNA, 25 bp, synthetic construct
  source 1..25: mol_type = other DNA
agtaattcaaccacacatccatcca

SEQ ID NO: 1072 - DNA, 25 bp, synthetic construct
  source 1..25: mol_type = other DNA
cagtaattcaaccacacatccatcc

SEQ ID NO: 1073 - DNA, 25 bp, synthetic construct
  source 1..25: mol_type = other DNA
tcagtaattcaaccacacatccatc

SEQ ID NO: 1074 - DNA, 25 bp, synthetic construct
  source 1..25: mol_type = other DNA
ttcagtaattcaaccacacatccat

SEQ ID NO: 1075 - DNA, 25 bp, synthetic construct
  source 1..25: mol_type = other DNA
tttcagtaattcaaccacacatcca

SEQ ID NO: 1076 - DNA, 25 bp, synthetic construct
  source 1..25: mol_type = other DNA
ctttcagtaattcaaccacacatcc

SEQ ID NO: 1077 - DNA, 25 bp, synthetic construct
  source 1..25: mol_type = other DNA
cctttcagtaattcaaccacacatc

SEQ ID NO: 1078 - DNA, 25 bp, synthetic construct
  source 1..25: mol_type = other DNA
acctttcagtaattcaaccacacat

SEQ ID NO: 1079 - DNA, 25 bp, synthetic construct
  source 1..25: mol_type = other DNA
aacctttcagtaattcaaccacaca

SEQ ID NO: 1080 - DNA, 25 bp, synthetic construct
  source 1..25: mol_type = other DNA
caacctttcagtaattcaaccacac

SEQ ID NO: 1081 - DNA, 25 bp, synthetic construct
  source 1..25: mol_type = other DNA
ccaacctttcagtaattcaaccaca

SEQ ID NO: 1082 - DNA, 25 bp, synthetic construct
  source 1..25: mol_type = other DNA
tccaacctttcagtaattcaaccac

SEQ ID NO: 1083 - DNA, 25 bp, synthetic construct
  source 1..25: mol_type = other DNA
ttccaacctttcagtaattcaacca

SEQ ID NO: 1084 - DNA, 25 bp, synthetic construct
  source 1..25: mol_type = other DNA
cttccaacctttcagtaattcaacc

SEQ ID NO: 1085 - DNA, 25 bp, synthetic construct
  source 1..25: mol_type = other DNA
tcttccaacctttcagtaattcaac

SEQ ID NO: 1086 - DNA, 25 bp, synthetic construct
  source 1..25: mol_type = other DNA
ctcttccaacctttcagtaattcaa

SEQ ID NO: 1087 - DNA, 25 bp, synthetic construct
  source 1..25: mol_type = other DNA
actcttccaacctttcagtaattca

SEQ ID NO: 1088 - DNA, 25 bp, synthetic construct
  source 1..25: mol_type = other DNA
cactcttccaacctttcagtaattc

SEQ ID NO: 1089 - DNA, 25 bp, synthetic construct
  source 1..25: mol_type = other DNA
ccactcttccaacctttcagtaatt

SEQ ID NO: 1090 - DNA, 25 bp, synthetic construct
  source 1..25: mol_type = other DNA
tccactcttccaacctttcagtaat

SEQ ID NO: 1091 - DNA, 25 bp, synthetic construct
  source 1..25: mol_type = other DNA
atccactcttccaacctttcagtaa

SEQ ID NO: 1092 - DNA, 25 bp, synthetic construct
  source 1..25: mol_type = other DNA
catccactcttccaacctttcagta

SEQ ID NO: 1093 - DNA, 25 bp, synthetic construct
  source 1..25: mol_type = other DNA
ccatccactcttccaacctttcagt

SEQ ID NO: 1094 - DNA, 25 bp, synthetic construct
  source 1..25: mol_type = other DNA
cccatccactcttccaacctttcag

SEQ ID NO: 1095 - DNA, 25 bp, synthetic construct
  source 1..25: mol_type = other DNA
acccatccactcttccaacctttca

SEQ ID NO: 1096 - DNA, 25 bp, synthetic construct
  source 1..25: mol_type = other DNA
cacccatccactcttccaacctttc

SEQ ID NO: 1097 - DNA, 25 bp, synthetic construct
  source 1..25: mol_type = other DNA
tcacccatccactcttccaaccttt

SEQ ID NO: 1098 - DNA, 25 bp, synthetic construct
  source 1..25: mol_type = other DNA
ttcacccatccactcttccaacctt

SEQ ID NO: 1099 - DNA, 25 bp, synthetic construct
  source 1..25: mol_type = other DNA
tttcacccatccactcttccaacct

SEQ ID NO: 1100 - DNA, 25 bp, synthetic construct
  source 1..25: mol_type = other DNA
atttcacccatccactcttccaacc

SEQ ID NO: 1101 - DNA, 25 bp, synthetic construct
  source 1..25: mol_type = other DNA
aatttcacccatccactcttccaac

SEQ ID NO: 1102 - DNA, 25 bp, synthetic construct
  source 1..25: mol_type = other DNA
aaatttcacccatccactcttccaa

SEQ ID NO: 1103 - DNA, 25 bp, synthetic construct
  source 1..25: mol_type = other DNA
caaatttcacccatccactcttcca

SEQ ID NO: 1104 - DNA, 25 bp, synthetic construct
  source 1..25: mol_type = other DNA
ccaaatttcacccatccactcttcc

SEQ ID NO: 1105 - DNA, 25 bp, synthetic construct
  source 1..25: mol_type = other DNA
cccaaatttcacccatccactcttc

SEQ ID NO: 1106 - DNA, 25 bp, synthetic construct
  source 1..25: mol_type = other DNA
ccccaaatttcacccatccactctt

SEQ ID NO: 1107 - DNA, 25 bp, synthetic construct
  source 1..25: mol_type = other DNA
accccaaatttcacccatccactct

SEQ ID NO: 1108 - DNA, 25 bp, synthetic construct
  source 1..25: mol_type = other DNA
taccccaaatttcacccatccactc

SEQ ID NO: 1109 - DNA, 25 bp, synthetic construct
  source 1..25: mol_type = other DNA
ctaccccaaatttcacccatccact

SEQ ID NO: 1110 - DNA, 25 bp, synthetic construct
  source 1..25: mol_type = other DNA
actaccccaaatttcacccatccac

SEQ ID NO: 1111 - DNA, 25 bp, synthetic construct
  source 1..25: mol_type = other DNA
aactaccccaaatttcacccatcca

SEQ ID NO: 1112 - DNA, 25 bp, synthetic construct
  source 1..25: mol_type = other DNA
taactaccccaaatttcacccatcc

SEQ ID NO: 1113 - DNA, 25 bp, synthetic construct
  source 1..25: mol_type = other DNA
ctaactaccccaaatttcacccatc

SEQ ID NO: 1114 - DNA, 25 bp, synthetic construct
  source 1..25: mol_type = other DNA
tctaactaccccaaatttcacccat

SEQ ID NO: 1115 - DNA, 25 bp, synthetic construct
  source 1..25: mol_type = other DNA
atctaactaccccaaatttcaccca

SEQ ID NO: 1116 - DNA, 25 bp, synthetic construct
  source 1..25: mol_type = other DNA
catctaactaccccaaatttcaccc

SEQ ID NO: 1117 - DNA, 25 bp, synthetic construct
  source 1..25: mol_type = other DNA
ccatctaactaccccaaatttcacc

SEQ ID NO: 1118 - DNA, 25 bp, synthetic construct
  source 1..25: mol_type = other DNA
cccatctaactaccccaaatttcac

SEQ ID NO: 1119 - DNA, 25 bp, synthetic construct
  source 1..25: mol_type = other DNA
acccatctaactaccccaaatttca

SEQ ID NO: 1120 - DNA, 25 bp, synthetic construct
  source 1..25: mol_type = other DNA
cacccatctaactaccccaaatttc

SEQ ID NO: 1121 - DNA, 25 bp, synthetic construct
  source 1..25: mol_type = other DNA
ccacccatctaactaccccaaattt

SEQ ID NO: 1122 - DNA, 25 bp, synthetic construct
  source 1..25: mol_type = other DNA
cccacccatctaactaccccaaatt

SEQ ID NO: 1123 - DNA, 25 bp, synthetic construct
  source 1..25: mol_type = other DNA
acccacccatctaactaccccaaat

SEQ ID NO: 1124 - DNA, 25 bp, synthetic construct
  source 1..25: mol_type = other DNA
cacccacccatctaactaccccaaa

SEQ ID NO: 1125 - DNA, 25 bp, synthetic construct
  source 1..25: mol_type = other DNA
acacccacccatctaactaccccaa

SEQ ID NO: 1126 - DNA, 25 bp, synthetic construct
  source 1..25: mol_type = other DNA
cacacccacccatctaactacccca

SEQ ID NO: 1127 - DNA, 25 bp, synthetic construct
  source 1..25: mol_type = other DNA
acacacccacccatctaactacccc

SEQ ID NO: 1128 - DNA, 25 bp, synthetic construct
  source 1..25: mol_type = other DNA
cacacacccacccatctaactaccc

SEQ ID NO: 1129 - DNA, 25 bp, synthetic construct
  source 1..25: mol_type = other DNA
ccacacacccacccatctaactacc

SEQ ID NO: 1130 - DNA, 25 bp, synthetic construct
  source 1..25: mol_type = other DNA
tccacacacccacccatctaactac

SEQ ID NO: 1131 - DNA, 25 bp, synthetic construct
  source 1..25: mol_type = other DNA
atccacacacccacccatctaacta

SEQ ID NO: 1132 - DNA, 25 bp, synthetic construct
  source 1..25: mol_type = other DNA
catccacacacccacccatctaact

SEQ ID NO: 1133 - DNA, 25 bp, synthetic construct
  source 1..25: mol_type = other DNA
ccatccacacacccacccatctaac

SEQ ID NO: 1134 - DNA, 25 bp, synthetic construct
  source 1..25: mol_type = other DNA
tccatccacacacccacccatctaa

SEQ ID NO: 1135 - DNA, 25 bp, synthetic construct
  source 1..25: mol_type = other DNA
atccatccacacacccacccatcta

SEQ ID NO: 1136 - DNA, 25 bp, synthetic construct
  source 1..25: mol_type = other DNA
tatccatccacacacccacccatct

SEQ ID NO: 1137 - DNA, 25 bp, synthetic construct
  source 1..25: mol_type = other DNA
ttatccatccacacacccacccatc

SEQ ID NO: 1138 - DNA, 25 bp, synthetic construct
  source 1..25: mol_type = other DNA
tttatccatccacacacccacccat

SEQ ID NO: 1139 - DNA, 25 bp, synthetic construct
  source 1..25: mol_type = other DNA
ttttatccatccacacacccaccca

SEQ ID NO: 1140 - DNA, 25 bp, synthetic construct
  source 1..25: mol_type = other DNA
cttttatccatccacacacccaccc

SEQ ID NO: 1141 - DNA, 25 bp, synthetic construct
  source 1..25: mol_type = other DNA
tcttttatccatccacacacccacc

SEQ ID NO: 1142 - DNA, 25 bp, synthetic construct
  source 1..25: mol_type = other DNA
ctcttttatccatccacacacccac

SEQ ID NO: 1143 - DNA, 25 bp, synthetic construct
  source 1..25: mol_type = other DNA
actcttttatccatccacacaccca

SEQ ID NO: 1144 - DNA, 25 bp, synthetic construct
  source 1..25: mol_type = other DNA
tactcttttatccatccacacaccc

SEQ ID NO: 1145 - DNA, 25 bp, synthetic construct
  source 1..25: mol_type = other DNA
ctactcttttatccatccacacacc

SEQ ID NO: 1146 - DNA, 25 bp, synthetic construct
  source 1..25: mol_type = other DNA
tctactcttttatccatccacacac

SEQ ID NO: 1147 - DNA, 25 bp, synthetic construct
  source 1..25: mol_type = other DNA
atctactcttttatccatccacaca

SEQ ID NO: 1148 - DNA, 25 bp, synthetic construct
  source 1..25: mol_type = other DNA
catctactcttttatccatccacac

SEQ ID NO: 1149 - DNA, 25 bp, synthetic construct
  source 1..25: mol_type = other DNA
tcatctactcttttatccatccaca

SEQ ID NO: 1150 - DNA, 25 bp, synthetic construct
  source 1..25: mol_type = other DNA
ttcatctactcttttatccatccac

SEQ ID NO: 1151 - DNA, 25 bp, synthetic construct
  source 1..25: mol_type = other DNA
attcatctactcttttatccatcca

SEQ ID NO: 1152 - DNA, 25 bp, synthetic construct
  source 1..25: mol_type = other DNA
cattcatctactcttttatccatcc

SEQ ID NO: 1153 - DNA, 25 bp, synthetic construct
  source 1..25: mol_type = other DNA
tcattcatctactcttttatccatc

SEQ ID NO: 1154 - DNA, 25 bp, synthetic construct
  source 1..25: mol_type = other DNA
ttcattcatctactcttttatccat

SEQ ID NO: 1155 - DNA, 25 bp, synthetic construct
  source 1..25: mol_type = other DNA
attcattcatctactcttttatcca

SEQ ID NO: 1156 - DNA, 25 bp, synthetic construct
  source 1..25: mol_type = other DNA
aattcattcatctactcttttatcc

SEQ ID NO: 1157 - DNA, 25 bp, synthetic construct
  source 1..25: mol_type = other DNA
taattcattcatctactcttttatc

SEQ ID NO: 1158 - DNA, 25 bp, synthetic construct
  source 1..25: mol_type = other DNA
ttaattcattcatctactcttttat

SEQ ID NO: 1159 - DNA, 25 bp, synthetic construct
  source 1..25: mol_type = other DNA
attaattcattcatctactctttta

SEQ ID NO: 1160 - DNA, 25 bp, synthetic construct
  source 1..25: mol_type = other DNA
cattaattcattcatctactctttt

SEQ ID NO: 1161 - DNA, 25 bp, synthetic construct
  source 1..25: mol_type = other DNA
tcattaattcattcatctactcttt

SEQ ID NO: 1162 - DNA, 25 bp, synthetic construct
  source 1..25: mol_type = other DNA
ttcattaattcattcatctactctt

SEQ ID NO: 1163 - DNA, 25 bp, synthetic construct
  source 1..25: mol_type = other DNA
attcattaattcattcatctactct

SEQ ID NO: 1164 - DNA, 25 bp, synthetic construct
  source 1..25: mol_type = other DNA
tattcattaattcattcatctactc

SEQ ID NO: 1165 - DNA, 25 bp, synthetic construct
  source 1..25: mol_type = other DNA
ttattcattaattcattcatctact

SEQ ID NO: 1166 - DNA, 25 bp, synthetic construct
  source 1..25: mol_type = other DNA
tttattcattaattcattcatctac

SEQ ID NO: 1167 - DNA, 25 bp, synthetic construct
  source 1..25: mol_type = other DNA
gtttattcattaattcattcatcta

SEQ ID NO: 1168 - DNA, 25 bp, synthetic construct
  source 1..25: mol_type = other DNA
tgtttattcattaattcattcatct

SEQ ID NO: 1169 - DNA, 25 bp, synthetic construct
  source 1..25: mol_type = other DNA
ctgtttattcattaattcattcatc

SEQ ID NO: 1170 - DNA, 25 bp, synthetic construct
  source 1..25: mol_type = other DNA
cctgtttattcattaattcattcat

SEQ ID NO: 1171 - DNA, 25 bp, synthetic construct
  source 1..25: mol_type = other DNA
gcctgtttattcattaattcattca

SEQ ID NO: 1172 - DNA, 25 bp, synthetic construct
  source 1..25: mol_type = other DNA
tgcctgtttattcattaattcattc

SEQ ID NO: 1173 - DNA, 25 bp, synthetic construct
  source 1..25: mol_type = other DNA
ctgcctgtttattcattaattcatt

SEQ ID NO: 1174 - DNA, 25 bp, synthetic construct
  source 1..25: mol_type = other DNA
tctgcctgtttattcattaattcat

SEQ ID NO: 1175 - DNA, 25 bp, synthetic construct
  source 1..25: mol_type = other DNA
atctgcctgtttattcattaattca

SEQ ID NO: 1176 - DNA, 25 bp, synthetic construct
  source 1..25: mol_type = other DNA
catctgcctgtttattcattaattc

SEQ ID NO: 1177 - DNA, 25 bp, synthetic construct
  source 1..25: mol_type = other DNA
ccatctgcctgtttattcattaatt

SEQ ID NO: 1178 - DNA, 25 bp, synthetic construct
  source 1..25: mol_type = other DNA
tccatctgcctgtttattcattaat

SEQ ID NO: 1179 - DNA, 25 bp, synthetic construct
  source 1..25: mol_type = other DNA
atccatctgcctgtttattcattaa

SEQ ID NO: 1180 - DNA, 25 bp, synthetic construct
  source 1..25: mol_type = other DNA
catccatctgcctgtttattcatta

SEQ ID NO: 1181 - DNA, 25 bp, synthetic construct
  source 1..25: mol_type = other DNA
tcatccatctgcctgtttattcatt

SEQ ID NO: 1182 - DNA, 25 bp, synthetic construct
  source 1..25: mol_type = other DNA
atcatccatctgcctgtttattcat

SEQ ID NO: 1183 - DNA, 25 bp, synthetic construct
  source 1..25: mol_type = other DNA
catcatccatctgcctgtttattca

SEQ ID NO: 1184 - DNA, 25 bp, synthetic construct
  source 1..25: mol_type = other DNA
acatcatccatctgcctgtttattc

SEQ ID NO: 1185 - DNA, 25 bp, synthetic construct
  source 1..25: mol_type = other DNA
tacatcatccatctgcctgtttatt

SEQ ID NO: 1186 - DNA, 25 bp, synthetic construct
  source 1..25: mol_type = other DNA
ttacatcatccatctgcctgtttat

SEQ ID NO: 1187 - DNA, 25 bp, synthetic construct
  source 1..25: mol_type = other DNA
cttacatcatccatctgcctgttta

SEQ ID NO: 1188 - DNA, 25 bp, synthetic construct
  source 1..25: mol_type = other DNA
gcttacatcatccatctgcctgttt

SEQ ID NO: 1189 - DNA, 25 bp, synthetic construct
  source 1..25: mol_type = other DNA
agcttacatcatccatctgcctgtt

SEQ ID NO: 1190 - DNA, 25 bp, synthetic construct
  source 1..25: mol_type = other DNA
cagcttacatcatccatctgcctgt

SEQ ID NO: 1191 - DNA, 25 bp, synthetic construct
  source 1..25: mol_type = other DNA
gcagcttacatcatccatctgcctg

SEQ ID NO: 1192 - DNA, 25 bp, synthetic construct
  source 1..25: mol_type = other DNA
ggcagcttacatcatccatctgcct

SEQ ID NO: 1193 - DNA, 25 bp, synthetic construct
  source 1..25: mol_type = other DNA
gggcagcttacatcatccatctgcc

SEQ ID NO: 1194 - DNA, 25 bp, synthetic construct
  source 1..25: mol_type = other DNA
ggggcagcttacatcatccatctgc

SEQ ID NO: 1195 - DNA, 25 bp, synthetic construct
  source 1..25: mol_type = other DNA
tggggcagcttacatcatccatctg

SEQ ID NO: 1196 - DNA, 25 bp, synthetic construct
  source 1..25: mol_type = other DNA
ctggggcagcttacatcatccatct

SEQ ID NO: 1197 - DNA, 25 bp, synthetic construct
  source 1..25: mol_type = other DNA
tctggggcagcttacatcatccatc

SEQ ID NO: 1198 - DNA, 25 bp, synthetic construct
  source 1..25: mol_type = other DNA
gtctggggcagcttacatcatccat

SEQ ID NO: 1199 - DNA, 25 bp, synthetic construct
  source 1..25: mol_type = other DNA
ggtctggggcagcttacatcatcca

SEQ ID NO: 1200 - DNA, 25 bp, synthetic construct
  source 1..25: mol_type = other DNA
gggtctggggcagcttacatcatcc

SEQ ID NO: 1201 - DNA, 25 bp, synthetic construct
  source 1..25: mol_type = other DNA
agggtctggggcagcttacatcatc

SEQ ID NO: 1202 - DNA, 25 bp, synthetic construct
  source 1..25: mol_type = other DNA
cagggtctggggcagcttacatcat

SEQ ID NO: 1203 - DNA, 25 bp, synthetic construct
  source 1..25: mol_type = other DNA
ccagggtctggggcagcttacatca

SEQ ID NO: 1204 - DNA, 25 bp, synthetic construct
  source 1..25: mol_type = other DNA
cccagggtctggggcagcttacatc

SEQ ID NO: 1205 - DNA, 25 bp, synthetic construct
  source 1..25: mol_type = other DNA
tcccagggtctggggcagcttacat

SEQ ID NO: 1206 - DNA, 25 bp, synthetic construct
  source 1..25: mol_type = other DNA
gtcccagggtctggggcagcttaca

SEQ ID NO: 1207 - DNA, 25 bp, synthetic construct
  source 1..25: mol_type = other DNA
ggtcccagggtctggggcagcttac

SEQ ID NO: 1208 - DNA, 25 bp, synthetic construct
  source 1..25: mol_type = other DNA
aggtcccagggtctggggcagctta

SEQ ID NO: 1209 - DNA, 25 bp, synthetic construct
  source 1..25: mol_type = other DNA
gaggtcccagggtctggggcagctt

SEQ ID NO: 1210 - DNA, 25 bp, synthetic construct
  source 1..25: mol_type = other DNA
agaggtcccagggtctggggcagct

SEQ ID NO: 1211 - DNA, 25 bp, synthetic construct
  source 1..25: mol_type = other DNA
cagaggtcccagggtctggggcagc

SEQ ID NO: 1212 - DNA, 25 bp, synthetic construct
  source 1..25: mol_type = other DNA
tcagaggtcccagggtctggggcag

SEQ ID NO: 1213 - DNA, 25 bp, synthetic construct
  source 1..25: mol_type = other DNA
gtcagaggtcccagggtctggggca

SEQ ID NO: 1214 - DNA, 25 bp, synthetic construct
  source 1..25: mol_type = other DNA
ggtcagaggtcccagggtctggggc

SEQ ID NO: 1215 - DNA, 25 bp, synthetic construct
  source 1..25: mol_type = other DNA
gggtcagaggtcccagggtctgggg

SEQ ID NO: 1216 - DNA, 25 bp, synthetic construct
  source 1..25: mol_type = other DNA
ggggtcagaggtcccagggtctggg

SEQ ID NO: 1217 - DNA, 25 bp, synthetic construct
  source 1..25: mol_type = other DNA
gggggtcagaggtcccagggtctgg

SEQ ID NO: 1218 - DNA, 25 bp, synthetic construct
  source 1..25: mol_type = other DNA
cgggggtcagaggtcccagggtctg

SEQ ID NO: 1219 - DNA, 25 bp, synthetic construct
  source 1..25: mol_type = other DNA
ccgggggtcagaggtcccagggtct

SEQ ID NO: 1220 - DNA, 25 bp, synthetic construct
  source 1..25: mol_type = other DNA
gccgggggtcagaggtcccagggtc

SEQ ID NO: 1221 - DNA, 25 bp, synthetic construct
  source 1..25: mol_type = other DNA
cgccgggggtcagaggtcccagggt

SEQ ID NO: 1222 - DNA, 25 bp, synthetic construct
  source 1..25: mol_type = other DNA
tcgccgggggtcagaggtcccaggg

SEQ ID NO: 1223 - DNA, 25 bp, synthetic construct
  source 1..25: mol_type = other DNA
gtcgccgggggtcagaggtcccagg

SEQ ID NO: 1224 - DNA, 25 bp, synthetic construct
  source 1..25: mol_type = other DNA
ggtcgccgggggtcagaggtcccag

SEQ ID NO: 1225 - DNA, 25 bp, synthetic construct
  source 1..25: mol_type = other DNA
gggtcgccgggggtcagaggtccca

SEQ ID NO: 1226 - DNA, 25 bp, synthetic construct
  source 1..25: mol_type = other DNA
ggggtcgccgggggtcagaggtccc

SEQ ID NO: 1227 - DNA, 25 bp, synthetic construct
  source 1..25: mol_type = other DNA
aggggtcgccgggggtcagaggtcc

SEQ ID NO: 1228 - DNA, 25 bp, synthetic construct
  source 1..25: mol_type = other DNA
aaggggtcgccgggggtcagaggtc

SEQ ID NO: 1229 - DNA, 25 bp, synthetic construct
  source 1..25: mol_type = other DNA
caaggggtcgccgggggtcagaggt

SEQ ID NO: 1230 - DNA, 25 bp, synthetic construct
  source 1..25: mol_type = other DNA
gcaaggggtcgccgggggtcagagg

SEQ ID NO: 1231 - DNA, 25 bp, synthetic construct
  source 1..25: mol_type = other DNA
tgcaaggggtcgccgggggtcagag

SEQ ID NO: 1232 - DNA, 25 bp, synthetic construct
  source 1..25: mol_type = other DNA
gtgcaaggggtcgccgggggtcaga

SEQ ID NO: 1233 - DNA, 25 bp, synthetic construct
  source 1..25: mol_type = other DNA
agtgcaaggggtcgccgggggtcag

SEQ ID NO: 1234 - DNA, 25 bp, synthetic construct
  source 1..25: mol_type = other DNA
gagtgcaaggggtcgccgggggtca

SEQ ID NO: 1235 - DNA, 25 bp, synthetic construct
  source 1..25: mol_type = other DNA
agagtgcaaggggtcgccgggggtc

SEQ ID NO: 1236 - DNA, 25 bp, synthetic construct
  source 1..25: mol_type = other DNA
gagagtgcaaggggtcgccgggggt

SEQ ID NO: 1237 - DNA, 25 bp, synthetic construct
  source 1..25: mol_type = other DNA
ggagagtgcaaggggtcgccggggg

SEQ ID NO: 1238 - DNA, 25 bp, synthetic construct
  source 1..25: mol_type = other DNA
tggagagtgcaaggggtcgccgggg

SEQ ID NO: 1239 - DNA, 25 bp, synthetic construct
  source 1..25: mol_type = other DNA
atggagagtgcaaggggtcgccggg

SEQ ID NO: 1240 - DNA, 25 bp, synthetic construct
  source 1..25: mol_type = other DNA
catggagagtgcaaggggtcgccgg

SEQ ID NO: 1241 - DNA, 25 bp, synthetic construct
  source 1..25: mol_type = other DNA
tcatggagagtgcaaggggtcgccg

SEQ ID NO: 1242 - DNA, 25 bp, synthetic construct
  source 1..25: mol_type = other DNA
gtcatggagagtgcaaggggtcgcc

SEQ ID NO: 1243 - DNA, 25 bp, synthetic construct
  source 1..25: mol_type = other DNA
tgtcatggagagtgcaaggggtcgc

SEQ ID NO: 1244 - DNA, 25 bp, synthetic construct
  source 1..25: mol_type = other DNA
gtgtcatggagagtgcaaggggtcg

SEQ ID NO: 1245 - DNA, 25 bp, synthetic construct
  source 1..25: mol_type = other DNA
agtgtcatggagagtgcaaggggtc

SEQ ID NO: 1246 - DNA, 25 bp, synthetic construct
  source 1..25: mol_type = other DNA
aagtgtcatggagagtgcaaggggt

SEQ ID NO: 1247 - DNA, 25 bp, synthetic construct
  source 1..25: mol_type = other DNA
aaagtgtcatggagagtgcaagggg

SEQ ID NO: 1248 - DNA, 25 bp, synthetic construct
  source 1..25: mol_type = other DNA
gaaagtgtcatggagagtgcaaggg

SEQ ID NO: 1249 - DNA, 25 bp, synthetic construct
  source 1..25: mol_type = other DNA
agaaagtgtcatggagagtgcaagg

SEQ ID NO: 1250 - DNA, 25 bp, synthetic construct
  source 1..25: mol_type = other DNA
gagaaagtgtcatggagagtgcaag

SEQ ID NO: 1251 - DNA, 25 bp, synthetic construct
  source 1..25: mol_type = other DNA
agagaaagtgtcatggagagtgcaa

SEQ ID NO: 1252 - DNA, 25 bp, synthetic construct
  source 1..25: mol_type = other DNA
gagagaaagtgtcatggagagtgca

SEQ ID NO: 1253 - DNA, 25 bp, synthetic construct
  source 1..25: mol_type = other DNA
ggagagaaagtgtcatggagagtgc

SEQ ID NO: 1254 - DNA, 25 bp, synthetic construct
  source 1..25: mol_type = other DNA
gggagagaaagtgtcatggagagtg

SEQ ID NO: 1255 - DNA, 25 bp, synthetic construct
  source 1..25: mol_type = other DNA
tgggagagaaagtgtcatggagagt

SEQ ID NO: 1256 - DNA, 25 bp, synthetic construct
  source 1..25: mol_type = other DNA
atgggagagaaagtgtcatggagag

SEQ ID NO: 1257 - DNA, 25 bp, synthetic construct
  source 1..25: mol_type = other DNA
catgggagagaaagtgtcatggaga

SEQ ID NO: 1258 - DNA, 25 bp, synthetic construct
  source 1..25: mol_type = other DNA
ccatgggagagaaagtgtcatggag

SEQ ID NO: 1259 - DNA, 25 bp, synthetic construct
  source 1..25: mol_type = other DNA
accatgggagagaaagtgtcatgga

SEQ ID NO: 1260 - DNA, 25 bp, synthetic construct
  source 1..25: mol_type = other DNA
caccatgggagagaaagtgtcatgg

SEQ ID NO: 1261 - DNA, 25 bp, synthetic construct
  source 1..25: mol_type = other DNA
ccaccatgggagagaaagtgtcatg

SEQ ID NO: 1262 - DNA, 25 bp, synthetic construct
  source 1..25: mol_type = other DNA
gccaccatgggagagaaagtgtcat

SEQ ID NO: 1263 - DNA, 25 bp, synthetic construct
  source 1..25: mol_type = other DNA
tgccaccatgggagagaaagtgtca

SEQ ID NO: 1264 - DNA, 25 bp, synthetic construct
  source 1..25: mol_type = other DNA
ctgccaccatgggagagaaagtgtc

SEQ ID NO: 1265 - DNA, 25 bp, Homo sapiens
  source 1..25: mol_type = genomic DNA
gtgagggtcattgctcggcccctcc

SEQ ID NO: 1266 - DNA, 25 bp, Homo sapiens
  source 1..25: mol_type = genomic DNA
tgagggtcattgctcggcccctccc

SEQ ID NO: 1267 - DNA, 25 bp, Homo sapiens
  source 1..25: mol_type = genomic DNA
gagggtcattgctcggcccctccca

SEQ ID NO: 1268 - DNA, 25 bp, Homo sapiens
  source 1..25: mol_type = genomic DNA
agggtcattgctcggcccctcccat

SEQ ID NO: 1269 - DNA, 25 bp, Homo sapiens
  source 1..25: mol_type = genomic DNA
gggtcattgctcggcccctcccatg

SEQ ID NO: 1270 - DNA, 25 bp, Homo sapiens
  source 1..25: mol_type = genomic DNA
ggtcattgctcggcccctcccatgc

SEQ ID NO: 1271 - DNA, 25 bp, Homo sapiens
  source 1..25: mol_type = genomic DNA
gtcattgctcggcccctcccatgcc

SEQ ID NO: 1272 - DNA, 25 bp, Homo sapiens
  source 1..25: mol_type = genomic DNA
tcattgctcggcccctcccatgcca

SEQ ID NO: 1273 - DNA, 25 bp, Homo sapiens
  source 1..25: mol_type = genomic DNA
cattgctcggcccctcccatgccac

SEQ ID NO: 1274 - DNA, 25 bp, Homo sapiens
  source 1..25: mol_type = genomic DNA
attgctcggcccctcccatgccact

SEQ ID NO: 1275 - DNA, 25 bp, Homo sapiens
  source 1..25: mol_type = genomic DNA
ttgctcggcccctcccatgccactt

SEQ ID NO: 1276 - DNA, 25 bp, Homo sapiens
  source 1..25: mol_type = genomic DNA
tgctcggcccctcccatgccacttc

SEQ ID NO: 1277 - DNA, 25 bp, Homo sapiens
  source 1..25: mol_type = genomic DNA
gctcggcccctcccatgccacttcc

SEQ ID NO: 1278 - DNA, 25 bp, Homo sapiens
  source 1..25: mol_type = genomic DNA
ctcggcccctcccatgccacttcca

SEQ ID NO: 1279 - DNA, 25 bp, Homo sapiens
  source 1..25: mol_type = genomic DNA
tcggcccctcccatgccacttccac

SEQ ID NO: 1280 - DNA, 25 bp, Homo sapiens
  source 1..25: mol_type = genomic DNA
cggcccctcccatgccacttccact

SEQ ID NO: 1281 - DNA, 25 bp, Homo sapiens
  source 1..25: mol_type = genomic DNA
ggcccctcccatgccacttccactc

SEQ ID NO: 1282 - DNA, 25 bp, Homo sapiens
  source 1..25: mol_type = genomic DNA
gcccctcccatgccacttccactca

SEQ ID NO: 1283 - DNA, 25 bp, Homo sapiens
  source 1..25: mol_type = genomic DNA
cccctcccatgccacttccactcac

SEQ ID NO: 1284 - DNA, 25 bp, Homo sapiens
  source 1..25: mol_type = genomic DNA
ccctcccatgccacttccactcacc

SEQ ID NO: 1285 - DNA, 25 bp, Homo sapiens
  source 1..25: mol_type = genomic DNA
cctcccatgccacttccactcacca

SEQ ID NO: 1286 - DNA, 25 bp, Homo sapiens
  source 1..25: mol_type = genomic DNA
ctcccatgccacttccactcaccat

SEQ ID NO: 1287 - DNA, 25 bp, Homo sapiens
  source 1..25: mol_type = genomic DNA
tcccatgccacttccactcaccatt

SEQ ID NO: 1288 - DNA, 25 bp, Homo sapiens
  source 1..25: mol_type = genomic DNA
cccatgccacttccactcaccattc

SEQ ID NO: 1289 - DNA, 25 bp, Homo sapiens
  source 1..25: mol_type = genomic DNA
ccatgccacttccactcaccattcc

SEQ ID NO: 1290 - DNA, 25 bp, Homo sapiens
  source 1..25: mol_type = genomic DNA
catgccacttccactcaccattcct

SEQ ID NO: 1291 - DNA, 25 bp, Homo sapiens
  source 1..25: mol_type = genomic DNA
atgccacttccactcaccattcctg

SEQ ID NO: 1292 - DNA, 25 bp, Homo sapiens
  source 1..25: mol_type = genomic DNA
tgccacttccactcaccattcctgc

SEQ ID NO: 1293 - DNA, 25 bp, Homo sapiens
  source 1..25: mol_type = genomic DNA
gccacttccactcaccattcctgcc

SEQ ID NO: 1294 - DNA, 25 bp, Homo sapiens
  source 1..25: mol_type = genomic DNA
ccacttccactcaccattcctgcct

SEQ ID NO: 1295 - DNA, 25 bp, Homo sapiens
  source 1..25: mol_type = genomic DNA
cacttccactcaccattcctgcctg

SEQ ID NO: 1296 - DNA, 25 bp, Homo sapiens
  source 1..25: mol_type = genomic DNA
acttccactcaccattcctgcctgc

SEQ ID NO: 1297 - DNA, 25 bp, Homo sapiens
  source 1..25: mol_type = genomic DNA
cttccactcaccattcctgcctgcc

SEQ ID NO: 1298 - DNA, 25 bp, Homo sapiens
  source 1..25: mol_type = genomic DNA
ttccactcaccattcctgcctgccc

SEQ ID NO: 1299 - DNA, 25 bp, Homo sapiens
  source 1..25: mol_type = genomic DNA
tccactcaccattcctgcctgccca

SEQ ID NO: 1300 - DNA, 25 bp, Homo sapiens
  source 1..25: mol_type = genomic DNA
ccactcaccattcctgcctgcccag

SEQ ID NO: 1301 - DNA, 25 bp, Homo sapiens
  source 1..25: mol_type = genomic DNA
cactcaccattcctgcctgcccagc

SEQ ID NO: 1302 - DNA, 25 bp, Homo sapiens
  source 1..25: mol_type = genomic DNA
actcaccattcctgcctgcccagct

SEQ ID NO: 1303 - DNA, 25 bp, Homo sapiens
  source 1..25: mol_type = genomic DNA
ctcaccattcctgcctgcccagctc

SEQ ID NO: 1304 - DNA, 25 bp, Homo sapiens
  source 1..25: mol_type = genomic DNA
tcaccattcctgcctgcccagctct

SEQ ID NO: 1305 - DNA, 25 bp, Homo sapiens
  source 1..25: mol_type = genomic DNA
caccattcctgcctgcccagctctt

SEQ ID NO: 1306 - DNA, 25 bp, Homo sapiens
  source 1..25: mol_type = genomic DNA
accattcctgcctgcccagctcttc

SEQ ID NO: 1307 - DNA, 25 bp, Homo sapiens
  source 1..25: mol_type = genomic DNA
ccattcctgcctgcccagctcttcc

SEQ ID NO: 1308 - DNA, 25 bp, Homo sapiens
  source 1..25: mol_type = genomic DNA
cattcctgcctgcccagctcttcct

SEQ ID NO: 1309 - DNA, 25 bp, Homo sapiens
  source 1..25: mol_type = genomic DNA
attcctgcctgcccagctcttcctc

SEQ ID NO: 1310 - DNA, 25 bp, Homo sapiens
  source 1..25: mol_type = genomic DNA
ttcctgcctgcccagctcttcctct

SEQ ID NO: 1311 - DNA, 25 bp, Homo sapiens
  source 1..25: mol_type = genomic DNA
tcctgcctgcccagctcttcctctt

SEQ ID NO: 1312 - DNA, 25 bp, Homo sapiens
  source 1..25: mol_type = genomic DNA
cctgcctgcccagctcttcctcttt

SEQ ID NO: 1313 - DNA, 25 bp, Homo sapiens
  source 1..25: mol_type = genomic DNA
ctgcctgcccagctcttcctctttc

SEQ ID NO: 1314 - DNA, 25 bp, Homo sapiens
  source 1..25: mol_type = genomic DNA
tgcctgcccagctcttcctctttct

SEQ ID NO: 1315 - DNA, 25 bp, Homo sapiens
  source 1..25: mol_type = genomic DNA
gcctgcccagctcttcctctttctg

SEQ ID NO: 1316 - DNA, 25 bp, Homo sapiens
  source 1..25: mol_type = genomic DNA
cctgcccagctcttcctctttctgg

SEQ ID NO: 1317 - DNA, 25 bp, Homo sapiens
  source 1..25: mol_type = genomic DNA
ctgcccagctcttcctctttctggc

SEQ ID NO: 1318 - DNA, 25 bp, Homo sapiens
  source 1..25: mol_type = genomic DNA
tgcccagctcttcctctttctggcc

SEQ ID NO: 1319 - DNA, 25 bp, Homo sapiens
  source 1..25: mol_type = genomic DNA
gcccagctcttcctctttctggcca

SEQ ID NO: 1320 - DNA, 25 bp, Homo sapiens
  source 1..25: mol_type = genomic DNA
cccagctcttcctctttctggccac

SEQ ID NO: 1321 - DNA, 25 bp, Homo sapiens
  source 1..25: mol_type = genomic DNA
ccagctcttcctctttctggccaca

SEQ ID NO: 1322 - DNA, 25 bp, Homo sapiens
  source 1..25: mol_type = genomic DNA
cagctcttcctctttctggccacac

SEQ ID NO: 1323 - DNA, 25 bp, Homo sapiens
  source 1..25: mol_type = genomic DNA
agctcttcctctttctggccacacc

SEQ ID NO: 1324 - DNA, 25 bp, Homo sapiens
  source 1..25: mol_type = genomic DNA
gctcttcctctttctggccacacca

SEQ ID NO: 1325 - DNA, 25 bp, Homo sapiens
  source 1..25: mol_type = genomic DNA
ctcttcctctttctggccacaccat

SEQ ID NO: 1326 - DNA, 25 bp, Homo sapiens
  source 1..25: mol_type = genomic DNA
tcttcctctttctggccacaccatc

SEQ ID NO: 1327 - DNA, 25 bp, Homo sapiens
  source 1..25: mol_type = genomic DNA
cttcctctttctggccacaccatcc

SEQ ID NO: 1328 - DNA, 25 bp, Homo sapiens
  source 1..25: mol_type = genomic DNA
ttcctctttctggccacaccatcca

SEQ ID NO: 1329 - DNA, 25 bp, Homo sapiens
  source 1..25: mol_type = genomic DNA
tcctctttctggccacaccatccac

SEQ ID NO: 1330 - DNA, 25 bp, Homo sapiens
  source 1..25: mol_type = genomic DNA
cctctttctggccacaccatccaca

SEQ ID NO: 1331 - DNA, 25 bp, Homo sapiens
  source 1..25: mol_type = genomic DNA
ctctttctggccacaccatccacac

SEQ ID NO: 1332 - DNA, 25 bp, Homo sapiens
  source 1..25: mol_type = genomic DNA
tctttctggccacaccatccacact

SEQ ID NO: 1333 - DNA, 25 bp, Homo sapiens
  source 1..25: mol_type = genomic DNA
ctttctggccacaccatccacactc

SEQ ID NO: 1334 - DNA, 25 bp, Homo sapiens
  source 1..25: mol_type = genomic DNA
tttctggccacaccatccacactct

SEQ ID NO: 1335 - DNA, 25 bp, Homo sapiens
  source 1..25: mol_type = genomic DNA
ttctggccacaccatccacactctc

SEQ ID NO: 1336 - DNA, 25 bp, Homo sapiens
  source 1..25: mol_type = genomic DNA
tctggccacaccatccacactctcc

SEQ ID NO: 1337 - DNA, 25 bp, Homo sapiens
  source 1..25: mol_type = genomic DNA
ctggccacaccatccacactctcct

SEQ ID NO: 1338 - DNA, 25 bp, Homo sapiens
  source 1..25: mol_type = genomic DNA
tggccacaccatccacactctcctg

SEQ ID NO: 1339 - DNA, 25 bp, Homo sapiens
  source 1..25: mol_type = genomic DNA
ggccacaccatccacactctcctgg

SEQ ID NO: 1340 - DNA, 25 bp, Homo sapiens
  source 1..25: mol_type = genomic DNA
gccacaccatccacactctcctggc

SEQ ID NO: 1341 - DNA, 25 bp, Homo sapiens
  source 1..25: mol_type = genomic DNA
ccacaccatccacactctcctggcc

SEQ ID NO: 1342 - DNA, 25 bp, Homo sapiens
  source 1..25: mol_type = genomic DNA
cacaccatccacactctcctggccc

SEQ ID NO: 1343 - DNA, 25 bp, Homo sapiens
  source 1..25: mol_type = genomic DNA
acaccatccacactctcctggccct

SEQ ID NO: 1344 - DNA, 25 bp, Homo sapiens
  source 1..25: mol_type = genomic DNA
caccatccacactctcctggccctc

SEQ ID NO: 1345 - DNA, 25 bp, Homo sapiens
  source 1..25: mol_type = genomic DNA
accatccacactctcctggccctct

SEQ ID NO: 1346 - DNA, 25 bp, Homo sapiens
  source 1..25: mol_type = genomic DNA
ccatccacactctcctggccctctg

SEQ ID NO: 1347 - DNA, 25 bp, Homo sapiens
  source 1..25: mol_type = genomic DNA
catccacactctcctggccctctga

SEQ ID NO: 1348 - DNA, 25 bp, Homo sapiens
  source 1..25: mol_type = genomic DNA
atccacactctcctggccctctgag

SEQ ID NO: 1349 - DNA, 25 bp, Homo sapiens
  source 1..25: mol_type = genomic DNA
tccacactctcctggccctctgaga

SEQ ID NO: 1350 - DNA, 25 bp, Homo sapiens
  source 1..25: mol_type = genomic DNA
ccacactctcctggccctctgagac

SEQ ID NO: 1351 - DNA, 25 bp, Homo sapiens
  source 1..25: mol_type = genomic DNA
cacactctcctggccctctgagact

SEQ ID NO: 1352 - DNA, 25 bp, Homo sapiens
  source 1..25: mol_type = genomic DNA
acactctcctggccctctgagactg

SEQ ID NO: 1353 - DNA, 25 bp, Homo sapiens
  source 1..25: mol_type = genomic DNA
cactctcctggccctctgagactgc

SEQ ID NO: 1354 - DNA, 25 bp, Homo sapiens
  source 1..25: mol_type = genomic DNA
actctcctggccctctgagactgcc

SEQ ID NO: 1355 - DNA, 25 bp, Homo sapiens
  source 1..25: mol_type = genomic DNA
ctctcctggccctctgagactgccc

SEQ ID NO: 1356 - DNA, 25 bp, Homo sapiens
  source 1..25: mol_type = genomic DNA
tctcctggccctctgagactgcccg

SEQ ID NO: 1357 - DNA, 25 bp, Homo sapiens
  source 1..25: mol_type = genomic DNA
ctcctggccctctgagactgcccgc

SEQ ID NO: 1358 - DNA, 25 bp, Homo sapiens
  source 1..25: mol_type = genomic DNA
tcctggccctctgagactgcccgcc

SEQ ID NO: 1359 - DNA, 25 bp, Homo sapiens
  source 1..25: mol_type = genomic DNA
cctggccctctgagactgcccgcca

SEQ ID NO: 1360 - DNA, 25 bp, Homo sapiens
  source 1..25: mol_type = genomic DNA
ctggccctctgagactgcccgccat

SEQ ID NO: 1361 - DNA, 25 bp, Homo sapiens
  source 1..25: mol_type = genomic DNA
tggccctctgagactgcccgccatg

SEQ ID NO: 1362 - DNA, 25 bp, Homo sapiens
  source 1..25: mol_type = genomic DNA
ggccctctgagactgcccgccatgc

SEQ ID NO: 1363 - DNA, 25 bp, Homo sapiens
  source 1..25: mol_type = genomic DNA
gccctctgagactgcccgccatgcc

SEQ ID NO: 1364 - DNA, 25 bp, Homo sapiens
  source 1..25: mol_type = genomic DNA
ccctctgagactgcccgccatgcca

SEQ ID NO: 1365 - DNA, 25 bp, Homo sapiens
  source 1..25: mol_type = genomic DNA
cctctgagactgcccgccatgccat

SEQ ID NO: 1366 - DNA, 25 bp, Homo sapiens
  source 1..25: mol_type = genomic DNA
ctctgagactgcccgccatgccatt

SEQ ID NO: 1367 - DNA, 25 bp, Homo sapiens
  source 1..25: mol_type = genomic DNA
tctgagactgcccgccatgccattc

SEQ ID NO: 1368 - DNA, 25 bp, Homo sapiens
  source 1..25: mol_type = genomic DNA
ctgagactgcccgccatgccattcc

SEQ ID NO: 1369 - DNA, 25 bp, Homo sapiens
  source 1..25: mol_type = genomic DNA
tgagactgcccgccatgccattccc

SEQ ID NO: 1370 - DNA, 25 bp, Homo sapiens
  source 1..25: mol_type = genomic DNA
gagactgcccgccatgccattccct

SEQ ID NO: 1371 - DNA, 25 bp, Homo sapiens
  source 1..25: mol_type = genomic DNA
agactgcccgccatgccattccctt

SEQ ID NO: 1372 - DNA, 25 bp, Homo sapiens
  source 1..25: mol_type = genomic DNA
gactgcccgccatgccattcccttt

SEQ ID NO: 1373 - DNA, 25 bp, Homo sapiens
  source 1..25: mol_type = genomic DNA
actgcccgccatgccattcccttta

SEQ ID NO: 1374 - DNA, 25 bp, Homo sapiens
  source 1..25: mol_type = genomic DNA
ctgcccgccatgccattccctttac

SEQ ID NO: 1375 - DNA, 25 bp, Homo sapiens
  source 1..25: mol_type = genomic DNA
tgcccgccatgccattccctttacc

SEQ ID NO: 1376 - DNA, 25 bp, Homo sapiens
  source 1..25: mol_type = genomic DNA
gcccgccatgccattccctttacct

SEQ ID NO: 1377 - DNA, 25 bp, Homo sapiens
  source 1..25: mol_type = genomic DNA
cccgccatgccattccctttacctg

SEQ ID NO: 1378 - DNA, 25 bp, Homo sapiens
  source 1..25: mol_type = genomic DNA
ccgccatgccattccctttacctgg

SEQ ID NO: 1379 - DNA, 25 bp, Homo sapiens
  source 1..25: mol_type = genomic DNA
cgccatgccattccctttacctgga

SEQ ID NO: 1380 - DNA, 25 bp, Homo sapiens
  source 1..25: mol_type = genomic DNA
gccatgccattccctttacctggaa

SEQ ID NO: 1381 - DNA, 25 bp, Homo sapiens
  source 1..25: mol_type = genomic DNA
ccatgccattccctttacctggaaa

SEQ ID NO: 1382 - DNA, 25 bp, Homo sapiens
  source 1..25: mol_type = genomic DNA
catgccattccctttacctggaaaa

SEQ ID NO: 1383 - DNA, 25 bp, Homo sapiens
  source 1..25: mol_type = genomic DNA
atgccattccctttacctggaaaac

SEQ ID NO: 1384 - DNA, 25 bp, Homo sapiens
  source 1..25: mol_type = genomic DNA
tgccattccctttacctggaaaact

SEQ ID NO: 1385 - DNA, 25 bp, Homo sapiens
  source 1..25: mol_type = genomic DNA
gccattccctttacctggaaaactc

SEQ ID NO: 1386 - DNA, 25 bp, Homo sapiens
  source 1..25: mol_type = genomic DNA
ccattccctttacctggaaaactcc

SEQ ID NO: 1387 - DNA, 25 bp, Homo sapiens
  source 1..25: mol_type = genomic DNA
cattccctttacctggaaaactcct

SEQ ID NO: 1388 - DNA, 25 bp, Homo sapiens
  source 1..25: mol_type = genomic DNA
attccctttacctggaaaactcctc

SEQ ID NO: 1389 - DNA, 25 bp, Homo sapiens
  source 1..25: mol_type = genomic DNA
ttccctttacctggaaaactcctcc

SEQ ID NO: 1390 - DNA, 25 bp, Homo sapiens
  source 1..25: mol_type = genomic DNA
tccctttacctggaaaactcctccc

SEQ ID NO: 1391 - DNA, 25 bp, Homo sapiens
  source 1..25: mol_type = genomic DNA
ccctttacctggaaaactcctccct

SEQ ID NO: 1392 - DNA, 25 bp, Homo sapiens
  source 1..25: mol_type = genomic DNA
cctttacctggaaaactcctcccta

SEQ ID NO: 1393 - DNA, 25 bp, Homo sapiens
  source 1..25: mol_type = genomic DNA
ctttacctggaaaactcctccctat

SEQ ID NO: 1394 - DNA, 25 bp, Homo sapiens
  source 1..25: mol_type = genomic DNA
tttacctggaaaactcctccctatc

SEQ ID NO: 1395 - DNA, 25 bp, Homo sapiens
  source 1..25: mol_type = genomic DNA
ttacctggaaaactcctccctatcc

SEQ ID NO: 1396 - DNA, 25 bp, Homo sapiens
  source 1..25: mol_type = genomic DNA
tacctggaaaactcctccctatcca

SEQ ID NO: 1397 - DNA, 25 bp, Homo sapiens
  source 1..25: mol_type = genomic DNA
acctggaaaactcctccctatccat

SEQ ID NO: 1398 - DNA, 25 bp, Homo sapiens
  source 1..25: mol_type = genomic DNA
cctggaaaactcctccctatccatc

SEQ ID NO: 1399 - DNA, 25 bp, Homo sapiens
  source 1..25: mol_type = genomic DNA
ctggaaaactcctccctatccatca

SEQ ID NO: 1400 - DNA, 25 bp, Homo sapiens
  source 1..25: mol_type = genomic DNA
tggaaaactcctccctatccatcaa

SEQ ID NO: 1401 - DNA, 25 bp, Homo sapiens
  source 1..25: mol_type = genomic DNA
ggaaaactcctccctatccatcaaa

SEQ ID NO: 1402 - DNA, 25 bp, Homo sapiens
  source 1..25: mol_type = genomic DNA
gaaaactcctccctatccatcaaag

SEQ ID NO: 1403 - DNA, 25 bp, Homo sapiens
  source 1..25: mol_type = genomic DNA
aaaactcctccctatccatcaaagt

SEQ ID NO: 1404 - DNA, 25 bp, Homo sapiens
  source 1..25: mol_type = genomic DNA
aaactcctccctatccatcaaagtc

SEQ ID NO: 1405 - DNA, 25 bp, Homo sapiens
  source 1..25: mol_type = genomic DNA
aactcctccctatccatcaaagtcc

SEQ ID NO: 1406 - DNA, 25 bp, Homo sapiens
  source 1..25: mol_type = genomic DNA
actcctccctatccatcaaagtcca

SEQ ID NO: 1407 - DNA, 25 bp, Homo sapiens
  source 1..25: mol_type = genomic DNA
ctcctccctatccatcaaagtccag

SEQ ID NO: 1408 - DNA, 25 bp, Homo sapiens
  source 1..25: mol_type = genomic DNA
tcctccctatccatcaaagtccaga

SEQ ID NO: 1409 - DNA, 25 bp, Homo sapiens
  source 1..25: mol_type = genomic DNA
cctccctatccatcaaagtccagat

SEQ ID NO: 1410 - DNA, 25 bp, Homo sapiens
  source 1..25: mol_type = genomic DNA
ctccctatccatcaaagtccagatt

SEQ ID NO: 1411 - DNA, 25 bp, Homo sapiens
  source 1..25: mol_type = genomic DNA
tccctatccatcaaagtccagattc

SEQ ID NO: 1412 - DNA, 25 bp, Homo sapiens
  source 1..25: mol_type = genomic DNA
ccctatccatcaaagtccagattca

SEQ ID NO: 1413 - DNA, 25 bp, Homo sapiens
  source 1..25: mol_type = genomic DNA
cctatccatcaaagtccagattcag

SEQ ID NO: 1414 - DNA, 25 bp, Homo sapiens
  source 1..25: mol_type = genomic DNA
ctatccatcaaagtccagattcagg

SEQ ID NO: 1415 - DNA, 25 bp, Homo sapiens
  source 1..25: mol_type = genomic DNA
tatccatcaaagtccagattcaggg

SEQ ID NO: 1416 - DNA, 25 bp, Homo sapiens
  source 1..25: mol_type = genomic DNA
atccatcaaagtccagattcagggt

SEQ ID NO: 1417 - DNA, 25 bp, Homo sapiens
  source 1..25: mol_type = genomic DNA
tccatcaaagtccagattcagggtc

SEQ ID NO: 1418 - DNA, 25 bp, Homo sapiens
  source 1..25: mol_type = genomic DNA
ccatcaaagtccagattcagggtca

SEQ ID NO: 1419 - DNA, 25 bp, Homo sapiens
  source 1..25: mol_type = genomic DNA
catcaaagtccagattcagggtcac

SEQ ID NO: 1420 - DNA, 25 bp, Homo sapiens
  source 1..25: mol_type = genomic DNA
atcaaagtccagattcagggtcacc

SEQ ID NO: 1421 - DNA, 25 bp, Homo sapiens
  source 1..25: mol_type = genomic DNA
tcaaagtccagattcagggtcacct

SEQ ID NO: 1422 - DNA, 25 bp, Homo sapiens
  source 1..25: mol_type = genomic DNA
caaagtccagattcagggtcacctc

SEQ ID NO: 1423 - DNA, 25 bp, Homo sapiens
  source 1..25: mol_type = genomic DNA
aaagtccagattcagggtcacctcc

SEQ ID NO: 1424 - DNA, 25 bp, Homo sapiens
  source 1..25: mol_type = genomic DNA
aagtccagattcagggtcacctcct

SEQ ID NO: 1425 - DNA, 25 bp, Homo sapiens
  source 1..25: mol_type = genomic DNA
agtccagattcagggtcacctcctc

SEQ ID NO: 1426 - DNA, 25 bp, Homo sapiens
  source 1..25: mol_type = genomic DNA
gtccagattcagggtcacctcctct

SEQ ID NO: 1427 - DNA, 25 bp, Homo sapiens
  source 1..25: mol_type = genomic DNA
tccagattcagggtcacctcctctg

SEQ ID NO: 1428 - DNA, 25 bp, Homo sapiens
  source 1..25: mol_type = genomic DNA
ccagattcagggtcacctcctctgg

SEQ ID NO: 1429 - DNA, 25 bp, Homo sapiens
  source 1..25: mol_type = genomic DNA
cagattcagggtcacctcctctggg

SEQ ID NO: 1430 - DNA, 25 bp, Homo sapiens
  source 1..25: mol_type = genomic DNA
agattcagggtcacctcctctggga

SEQ ID NO: 1431 - DNA, 25 bp, Homo sapiens
  source 1..25: mol_type = genomic DNA
gattcagggtcacctcctctgggaa

SEQ ID NO: 1432 - DNA, 25 bp, Homo sapiens
  source 1..25: mol_type = genomic DNA
attcagggtcacctcctctgggaag

SEQ ID NO: 1433 - DNA, 25 bp, Homo sapiens
  source 1..25: mol_type = genomic DNA
ttcagggtcacctcctctgggaagc

SEQ ID NO: 1434 - DNA, 25 bp, Homo sapiens
  source 1..25: mol_type = genomic DNA
tcagggtcacctcctctgggaagcc

SEQ ID NO: 1435 - DNA, 25 bp, Homo sapiens
  source 1..25: mol_type = genomic DNA
cagggtcacctcctctgggaagccc

SEQ ID NO: 1436 - DNA, 25 bp, Homo sapiens
  source 1..25: mol_type = genomic DNA
agggtcacctcctctgggaagccca

SEQ ID NO: 1437 - DNA, 25 bp, Homo sapiens
  source 1..25: mol_type = genomic DNA
gggtcacctcctctgggaagcccac

SEQ ID NO: 1438 - DNA, 25 bp, Homo sapiens
  source 1..25: mol_type = genomic DNA
ggtcacctcctctgggaagcccacc

SEQ ID NO: 1439 - DNA, 25 bp, Homo sapiens
  source 1..25: mol_type = genomic DNA
gtcacctcctctgggaagcccacct

SEQ ID NO: 1440 - DNA, 25 bp, Homo sapiens
  source 1..25: mol_type = genomic DNA
tcacctcctctgggaagcccacctt

SEQ ID NO: 1441 - DNA, 25 bp, Homo sapiens
  source 1..25: mol_type = genomic DNA
cacctcctctgggaagcccaccttg

SEQ ID NO: 1442 - DNA, 25 bp, Homo sapiens
  source 1..25: mol_type = genomic DNA
acctcctctgggaagcccaccttgg

SEQ ID NO: 1443 - DNA, 25 bp, Homo sapiens
  source 1..25: mol_type = genomic DNA
cctcctctgggaagcccaccttggc

SEQ ID NO: 1444 - DNA, 25 bp, Homo sapiens
  source 1..25: mol_type = genomic DNA
ctcctctgggaagcccaccttggcc

SEQ ID NO: 1445 - DNA, 25 bp, Homo sapiens
  source 1..25: mol_type = genomic DNA
tcctctgggaagcccaccttggcct

SEQ ID NO: 1446 - DNA, 25 bp, Homo sapiens
  source 1..25: mol_type = genomic DNA
cctctgggaagcccaccttggcctc

SEQ ID NO: 1447 - DNA, 25 bp, Homo sapiens
  source 1..25: mol_type = genomic DNA
ctctgggaagcccaccttggcctcc

SEQ ID NO: 1448 - DNA, 25 bp, Homo sapiens
  source 1..25: mol_type = genomic DNA
tctgggaagcccaccttggcctcca

SEQ ID NO: 1449 - DNA, 25 bp, Homo sapiens
  source 1..25: mol_type = genomic DNA
ctgggaagcccaccttggcctccag

SEQ ID NO: 1450 - DNA, 25 bp, Homo sapiens
  source 1..25: mol_type = genomic DNA
tgggaagcccaccttggcctccagg

SEQ ID NO: 1451 - DNA, 25 bp, Homo sapiens
  source 1..25: mol_type = genomic DNA
gggaagcccaccttggcctccaggt

SEQ ID NO: 1452 - DNA, 25 bp, Homo sapiens
  source 1..25: mol_type = genomic DNA
ggaagcccaccttggcctccaggtt

SEQ ID NO: 1453 - DNA, 25 bp, Homo sapiens
  source 1..25: mol_type = genomic DNA
gaagcccaccttggcctccaggttg

SEQ ID NO: 1454 - DNA, 25 bp, Homo sapiens
  source 1..25: mol_type = genomic DNA
aagcccaccttggcctccaggttga

SEQ ID NO: 1455 - DNA, 25 bp, Homo sapiens
  source 1..25: mol_type = genomic DNA
agcccaccttggcctccaggttgac

SEQ ID NO: 1456 - DNA, 25 bp, Homo sapiens
  source 1..25: mol_type = genomic DNA
gcccaccttggcctccaggttgact

SEQ ID NO: 1457 - DNA, 25 bp, Homo sapiens
  source 1..25: mol_type = genomic DNA
cccaccttggcctccaggttgactc

SEQ ID NO: 1458 - DNA, 25 bp, Homo sapiens
  source 1..25: mol_type = genomic DNA
ccaccttggcctccaggttgactct

SEQ ID NO: 1459 - DNA, 25 bp, Homo sapiens
  source 1..25: mol_type = genomic DNA
caccttggcctccaggttgactctc

SEQ ID NO: 1460 - DNA, 25 bp, Homo sapiens
  source 1..25: mol_type = genomic DNA
accttggcctccaggttgactctca

SEQ ID NO: 1461 - DNA, 25 bp, Homo sapiens
  source 1..25: mol_type = genomic DNA
ccttggcctccaggttgactctcac

SEQ ID NO: 1462 - DNA, 25 bp, Homo sapiens
  source 1..25: mol_type = genomic DNA
cttggcctccaggttgactctcact

SEQ ID NO: 1463 - DNA, 25 bp, Homo sapiens
  source 1..25: mol_type = genomic DNA
ttggcctccaggttgactctcacta

SEQ ID NO: 1464 - DNA, 25 bp, Homo sapiens
  source 1..25: mol_type = genomic DNA
tggcctccaggttgactctcactac

SEQ ID NO: 1465 - DNA, 25 bp, Homo sapiens
  source 1..25: mol_type = genomic DNA
ggcctccaggttgactctcactact

SEQ ID NO: 1466 - DNA, 25 bp, Homo sapiens
  source 1..25: mol_type = genomic DNA
gcctccaggttgactctcactactc

SEQ ID NO: 1467 - DNA, 25 bp, Homo sapiens
  source 1..25: mol_type = genomic DNA
cctccaggttgactctcactactca

SEQ ID NO: 1468 - DNA, 25 bp, Homo sapiens
  source 1..25: mol_type = genomic DNA
ctccaggttgactctcactactcat

SEQ ID NO: 1469 - DNA, 25 bp, Homo sapiens
  source 1..25: mol_type = genomic DNA
tccaggttgactctcactactcatc

SEQ ID NO: 1470 - DNA, 25 bp, Homo sapiens
  source 1..25: mol_type = genomic DNA
ccaggttgactctcactactcatca

SEQ ID NO: 1471 - DNA, 25 bp, Homo sapiens
  source 1..25: mol_type = genomic DNA
caggttgactctcactactcatcat

SEQ ID NO: 1472 - DNA, 25 bp, Homo sapiens
  source 1..25: mol_type = genomic DNA
aggttgactctcactactcatcatc

SEQ ID NO: 1473 - DNA, 25 bp, Homo sapiens
  source 1..25: mol_type = genomic DNA
ggttgactctcactactcatcatca

SEQ ID NO: 1474 - DNA, 25 bp, Homo sapiens
  source 1..25: mol_type = genomic DNA
gttgactctcactactcatcatcag

SEQ ID NO: 1475 - DNA, 25 bp, Homo sapiens
  source 1..25: mol_type = genomic DNA
ttgactctcactactcatcatcagg

SEQ ID NO: 1476 - DNA, 25 bp, Homo sapiens
  source 1..25: mol_type = genomic DNA
tgactctcactactcatcatcaggt

SEQ ID NO: 1477 - DNA, 25 bp, Homo sapiens
  source 1..25: mol_type = genomic DNA
gactctcactactcatcatcaggtt

SEQ ID NO: 1478 - DNA, 25 bp, Homo sapiens
  source 1..25: mol_type = genomic DNA
actctcactactcatcatcaggttc

SEQ ID NO: 1479 - DNA, 25 bp, Homo sapiens
  source 1..25: mol_type = genomic DNA
ctctcactactcatcatcaggttct

SEQ ID NO: 1480 - DNA, 25 bp, Homo sapiens
  source 1..25: mol_type = genomic DNA
tctcactactcatcatcaggttctt

SEQ ID NO: 1481 - DNA, 25 bp, Homo sapiens
  source 1..25: mol_type = genomic DNA
ctcactactcatcatcaggttcttc

SEQ ID NO: 1482 - DNA, 25 bp, Homo sapiens
  source 1..25: mol_type = genomic DNA
tcactactcatcatcaggttcttcc

SEQ ID NO: 1483 - DNA, 25 bp, Homo sapiens
  source 1..25: mol_type = genomic DNA
cactactcatcatcaggttcttcct

SEQ ID NO: 1484 - DNA, 25 bp, Homo sapiens
  source 1..25: mol_type = genomic DNA
actactcatcatcaggttcttcctt

SEQ ID NO: 1485 - DNA, 25 bp, Homo sapiens
  source 1..25: mol_type = genomic DNA
ctactcatcatcaggttcttccttc

SEQ ID NO: 1486 - DNA, 25 bp, Homo sapiens
  source 1..25: mol_type = genomic DNA
tactcatcatcaggttcttccttct

SEQ ID NO: 1487 - DNA, 25 bp, Homo sapiens
  source 1..25: mol_type = genomic DNA
actcatcatcaggttcttccttcta

SEQ ID NO: 1488 - DNA, 25 bp, Homo sapiens
  source 1..25: mol_type = genomic DNA
ctcatcatcaggttcttccttctat

SEQ ID NO: 1489 - DNA, 25 bp, Homo sapiens
  source 1..25: mol_type = genomic DNA
tcatcatcaggttcttccttctatt

SEQ ID NO: 1490 - DNA, 25 bp, Homo sapiens
  source 1..25: mol_type = genomic DNA
catcatcaggttcttccttctattc

SEQ ID NO: 1491 - DNA, 25 bp, Homo sapiens
  source 1..25: mol_type = genomic DNA
atcatcaggttcttccttctattcc

SEQ ID NO: 1492 - DNA, 25 bp, Homo sapiens
  source 1..25: mol_type = genomic DNA
tcatcaggttcttccttctattcca

SEQ ID NO: 1493 - DNA, 25 bp, Homo sapiens
  source 1..25: mol_type = genomic DNA
catcaggttcttccttctattccag

SEQ ID NO: 1494 - DNA, 25 bp, Homo sapiens
  source 1..25: mol_type = genomic DNA
atcaggttcttccttctattccagc

SEQ ID NO: 1495 - DNA, 25 bp, Homo sapiens
  source 1..25: mol_type = genomic DNA
tcaggttcttccttctattccagcc

SEQ ID NO: 1496 - DNA, 25 bp, Homo sapiens
  source 1..25: mol_type = genomic DNA
caggttcttccttctattccagccc

SEQ ID NO: 1497 - DNA, 25 bp, Homo sapiens
  source 1..25: mol_type = genomic DNA
aggttcttccttctattccagccct

SEQ ID NO: 1498 - DNA, 25 bp, Homo sapiens
  source 1..25: mol_type = genomic DNA
ggttcttccttctattccagcccta

SEQ ID NO: 1499 - DNA, 25 bp, Homo sapiens
  source 1..25: mol_type = genomic DNA
gttcttccttctattccagccctaa

SEQ ID NO: 1500 - DNA, 25 bp, Homo sapiens
  source 1..25: mol_type = genomic DNA
ttcttccttctattccagccctaac

SEQ ID NO: 1501 - DNA, 25 bp, Homo sapiens
  source 1..25: mol_type = genomic DNA
tcttccttctattccagccctaacc

SEQ ID NO: 1502 - DNA, 25 bp, Homo sapiens
  source 1..25: mol_type = genomic DNA
cttccttctattccagccctaacca

SEQ ID NO: 1503 - DNA, 25 bp, Homo sapiens
  source 1..25: mol_type = genomic DNA
ttccttctattccagccctaaccac

SEQ ID NO: 1504 - DNA, 25 bp, Homo sapiens
  source 1..25: mol_type = genomic DNA
tccttctattccagccctaaccact

SEQ ID NO: 1505 - DNA, 25 bp, Homo sapiens
  source 1..25: mol_type = genomic DNA
ccttctattccagccctaaccactc

SEQ ID NO: 1506 - DNA, 25 bp, Homo sapiens
  source 1..25: mol_type = genomic DNA
cttctattccagccctaaccactca

SEQ ID NO: 1507 - DNA, 25 bp, Homo sapiens
  source 1..25: mol_type = genomic DNA
ttctattccagccctaaccactcag

SEQ ID NO: 1508 - DNA, 25 bp, Homo sapiens
  source 1..25: mol_type = genomic DNA
tctattccagccctaaccactcagg

SEQ ID NO: 1509 - DNA, 25 bp, Homo sapiens
  source 1..25: mol_type = genomic DNA
ctattccagccctaaccactcagga

SEQ ID NO: 1510 - DNA, 25 bp, Homo sapiens
  source 1..25: mol_type = genomic DNA
tattccagccctaaccactcaggat

SEQ ID NO: 1511 - DNA, 25 bp, Homo sapiens
  source 1..25: mol_type = genomic DNA
attccagccctaaccactcaggatt

SEQ ID NO: 1512 - DNA, 25 bp, Homo sapiens
  source 1..25: mol_type = genomic DNA
ttccagccctaaccactcaggattg

SEQ ID NO: 1513 - DNA, 25 bp, Homo sapiens
  source 1..25: mol_type = genomic DNA
tccagccctaaccactcaggattgg

SEQ ID NO: 1514 - DNA, 25 bp, Homo sapiens
  source 1..25: mol_type = genomic DNA
ccagccctaaccactcaggattggg

SEQ ID NO: 1515 - DNA, 25 bp, Homo sapiens
  source 1..25: mol_type = genomic DNA
cagccctaaccactcaggattgggc

SEQ ID NO: 1516 - DNA, 25 bp, Homo sapiens
  source 1..25: mol_type = genomic DNA
agccctaaccactcaggattgggcc

SEQ ID NO: 1517 - DNA, 25 bp, Homo sapiens
  source 1..25: mol_type = genomic DNA
gccctaaccactcaggattgggccg

SEQ ID NO: 1518 - DNA, 25 bp, Homo sapiens
  source 1..25: mol_type = genomic DNA
ccctaaccactcaggattgggccgt

SEQ ID NO: 1519 - DNA, 25 bp, Homo sapiens
  source 1..25: mol_type = genomic DNA
cctaaccactcaggattgggccgtt

SEQ ID NO: 1520 - DNA, 25 bp, Homo sapiens
  source 1..25: mol_type = genomic DNA
ctaaccactcaggattgggccgttt

SEQ ID NO: 1521 - DNA, 25 bp, Homo sapiens
  source 1..25: mol_type = genomic DNA
taaccactcaggattgggccgtttg

SEQ ID NO: 1522 - DNA, 25 bp, Homo sapiens
  source 1..25: mol_type = genomic DNA
aaccactcaggattgggccgtttgt

SEQ ID NO: 1523 - DNA, 25 bp, Homo sapiens
  source 1..25: mol_type = genomic DNA
accactcaggattgggccgtttgtg

SEQ ID NO: 1524 - DNA, 25 bp, Homo sapiens
  source 1..25: mol_type = genomic DNA
ccactcaggattgggccgtttgtgt

SEQ ID NO: 1525 - DNA, 25 bp, Homo sapiens
  source 1..25: mol_type = genomic DNA
cactcaggattgggccgtttgtgtc

SEQ ID NO: 1526 - DNA, 25 bp, Homo sapiens
  source 1..25: mol_type = genomic DNA
actcaggattgggccgtttgtgtct

SEQ ID NO: 1527 - DNA, 25 bp, Homo sapiens
  source 1..25: mol_type = genomic DNA
ctcaggattgggccgtttgtgtctg

SEQ ID NO: 1528 - DNA, 25 bp, Homo sapiens
  source 1..25: mol_type = genomic DNA
tcaggattgggccgtttgtgtctgg

SEQ ID NO: 1529 - DNA, 25 bp, Homo sapiens
  source 1..25: mol_type = genomic DNA
caggattgggccgtttgtgtctggg

SEQ ID NO: 1530 - DNA, 25 bp, Homo sapiens
  source 1..25: mol_type = genomic DNA
aggattgggccgtttgtgtctgggt

SEQ ID NO: 1531 - DNA, 25 bp, Homo sapiens
  source 1..25: mol_type = genomic DNA
ggattgggccgtttgtgtctgggta

SEQ ID NO: 1532 - DNA, 25 bp, Homo sapiens
  source 1..25: mol_type = genomic DNA
gattgggccgtttgtgtctgggtat

SEQ ID NO: 1533 - DNA, 25 bp, Homo sapiens
  source 1..25: mol_type = genomic DNA
attgggccgtttgtgtctgggtatg

SEQ ID NO: 1534 - DNA, 25 bp, Homo sapiens
  source 1..25: mol_type = genomic DNA
ttgggccgtttgtgtctgggtatgt

SEQ ID NO: 1535 - DNA, 25 bp, Homo sapiens
  source 1..25: mol_type = genomic DNA
tgggccgtttgtgtctgggtatgtc

SEQ ID NO: 1536 - DNA, 25 bp, Homo sapiens
  source 1..25: mol_type = genomic DNA
gggccgtttgtgtctgggtatgtct

SEQ ID NO: 1537 - DNA, 25 bp, Homo sapiens
  source 1..25: mol_type = genomic DNA
ggccgtttgtgtctgggtatgtctc

SEQ ID NO: 1538 - DNA, 25 bp, Homo sapiens
  source 1..25: mol_type = genomic DNA
gccgtttgtgtctgggtatgtctct

SEQ ID NO: 1539 - DNA, 25 bp, Homo sapiens
  source 1..25: mol_type = genomic DNA
ccgtttgtgtctgggtatgtctctt

SEQ ID NO: 1540 - DNA, 25 bp, Homo sapiens
  source 1..25: mol_type = genomic DNA
cgtttgtgtctgggtatgtctcttc

SEQ ID NO: 1541 - DNA, 25 bp, Homo sapiens
  source 1..25: mol_type = genomic DNA
gtttgtgtctgggtatgtctcttcc

SEQ ID NO: 1542 - DNA, 25 bp, Homo sapiens
  source 1..25: mol_type = genomic DNA
tttgtgtctgggtatgtctcttcca

SEQ ID NO: 1543 - DNA, 25 bp, Homo sapiens
  source 1..25: mol_type = genomic DNA
ttgtgtctgggtatgtctcttccag

SEQ ID NO: 1544 - DNA, 25 bp, Homo sapiens
  source 1..25: mol_type = genomic DNA
tgtgtctgggtatgtctcttccagc

SEQ ID NO: 1545 - DNA, 25 bp, Homo sapiens
  source 1..25: mol_type = genomic DNA
gtgtctgggtatgtctcttccagct

SEQ ID NO: 1546 - DNA, 25 bp, Homo sapiens
  source 1..25: mol_type = genomic DNA
tgtctgggtatgtctcttccagctg

SEQ ID NO: 1547 - DNA, 25 bp, Homo sapiens
  source 1..25: mol_type = genomic DNA
gtctgggtatgtctcttccagctgc

SEQ ID NO: 1548 - DNA, 25 bp, Homo sapiens
  source 1..25: mol_type = genomic DNA
tctgggtatgtctcttccagctgcc

SEQ ID NO: 1549 - DNA, 25 bp, Homo sapiens
  source 1..25: mol_type = genomic DNA
ctgggtatgtctcttccagctgcct

SEQ ID NO: 1550 - DNA, 25 bp, Homo sapiens
  source 1..25: mol_type = genomic DNA
tgggtatgtctcttccagctgcctg

SEQ ID NO: 1551 - DNA, 25 bp, Homo sapiens
  source 1..25: mol_type = genomic DNA
gggtatgtctcttccagctgcctgg

SEQ ID NO: 1552 - DNA, 25 bp, Homo sapiens
  source 1..25: mol_type = genomic DNA
ggtatgtctcttccagctgcctggg

SEQ ID NO: 1553 - DNA, 25 bp, Homo sapiens
  source 1..25: mol_type = genomic DNA
gtatgtctcttccagctgcctgggt

SEQ ID NO: 1554 - DNA, 25 bp, Homo sapiens
  source 1..25: mol_type = genomic DNA
tatgtctcttccagctgcctgggtt

SEQ ID NO: 1555 - DNA, 25 bp, Homo sapiens
  source 1..25: mol_type = genomic DNA
atgtctcttccagctgcctgggttt

SEQ ID NO: 1556 - DNA, 25 bp, Homo sapiens
  source 1..25: mol_type = genomic DNA
tgtctcttccagctgcctgggtttc

SEQ ID NO: 1557 - DNA, 25 bp, Homo sapiens
  source 1..25: mol_type = genomic DNA
gtctcttccagctgcctgggtttcc

SEQ ID NO: 1558 - DNA, 25 bp, Homo sapiens
  source 1..25: mol_type = genomic DNA
tctcttccagctgcctgggtttcct

SEQ ID NO: 1559 - DNA, 25 bp, Homo sapiens
  source 1..25: mol_type = genomic DNA
ctcttccagctgcctgggtttcctg

SEQ ID NO: 1560 - DNA, 25 bp, Homo sapiens
  source 1..25: mol_type = genomic DNA
tcttccagctgcctgggtttcctgg

SEQ ID NO: 1561 - DNA, 25 bp, Homo sapiens
  source 1..25: mol_type = genomic DNA
cttccagctgcctgggtttcctgga

SEQ ID NO: 1562 - DNA, 25 bp, Homo sapiens
  source 1..25: mol_type = genomic DNA
ttccagctgcctgggtttcctggaa

SEQ ID NO: 1563 - DNA, 25 bp, Homo sapiens
  source 1..25: mol_type = genomic DNA
tccagctgcctgggtttcctggaaa

SEQ ID NO: 1564 - DNA, 25 bp, Homo sapiens
  source 1..25: mol_type = genomic DNA
ccagctgcctgggtttcctggaaag

SEQ ID NO: 1565 - DNA, 25 bp, Homo sapiens
  source 1..25: mol_type = genomic DNA
cagctgcctgggtttcctggaaaga

SEQ ID NO: 1566 - DNA, 25 bp, Homo sapiens
  source 1..25: mol_type = genomic DNA
agctgcctgggtttcctggaaagaa

SEQ ID NO: 1567 - DNA, 25 bp, Homo sapiens
  source 1..25: mol_type = genomic DNA
gctgcctgggtttcctggaaagaac

SEQ ID NO: 1568 - DNA, 25 bp, Homo sapiens
  source 1..25: mol_type = genomic DNA
ctgcctgggtttcctggaaagaact

SEQ ID NO: 1569 - DNA, 25 bp, Homo sapiens
  source 1..25: mol_type = genomic DNA
tgcctgggtttcctggaaagaactc

SEQ ID NO: 1570 - DNA, 25 bp, Homo sapiens
  source 1..25: mol_type = genomic DNA
gcctgggtttcctggaaagaactct

SEQ ID NO: 1571 - DNA, 25 bp, Homo sapiens
  source 1..25: mol_type = genomic DNA
cctgggtttcctggaaagaactctt

SEQ ID NO: 1572 - DNA, 25 bp, Homo sapiens
  source 1..25: mol_type = genomic DNA
ctgggtttcctggaaagaactctta

SEQ ID NO: 1573 - DNA, 25 bp, Homo sapiens
  source 1..25: mol_type = genomic DNA
tgggtttcctggaaagaactcttat

SEQ ID NO: 1574 - DNA, 25 bp, Homo sapiens
  source 1..25: mol_type = genomic DNA
gggtttcctggaaagaactcttatc

SEQ ID NO: 1575 - DNA, 25 bp, Homo sapiens
  source 1..25: mol_type = genomic DNA
ggtttcctggaaagaactcttatcc

SEQ ID NO: 1576 - DNA, 25 bp, Homo sapiens
  source 1..25: mol_type = genomic DNA
gtttcctggaaagaactcttatccc

SEQ ID NO: 1577 - DNA, 25 bp, Homo sapiens
  source 1..25: mol_type = genomic DNA
tttcctggaaagaactcttatcccc

SEQ ID NO: 1578 - DNA, 25 bp, Homo sapiens
  source 1..25: mol_type = genomic DNA
ttcctggaaagaactcttatcccca

SEQ ID NO: 1579 - DNA, 25 bp, Homo sapiens
  source 1..25: mol_type = genomic DNA
tcctggaaagaactcttatccccag

SEQ ID NO: 1580 - DNA, 25 bp, Homo sapiens
  source 1..25: mol_type = genomic DNA
cctggaaagaactcttatccccagg

SEQ ID NO: 1581 - DNA, 25 bp, Homo sapiens
  source 1..25: mol_type = genomic DNA
ctggaaagaactcttatccccagga

SEQ ID NO: 1582 - DNA, 25 bp, Homo sapiens
  source 1..25: mol_type = genomic DNA
tggaaagaactcttatccccaggaa

SEQ ID NO: 1583 - DNA, 25 bp, Homo sapiens
  source 1..25: mol_type = genomic DNA
ggaaagaactcttatccccaggaac

SEQ ID NO: 1584 - DNA, 25 bp, Homo sapiens
  source 1..25: mol_type = genomic DNA
gaaagaactcttatccccaggaact

SEQ ID NO: 1585 - DNA, 25 bp, Homo sapiens
  source 1..25: mol_type = genomic DNA
aaagaactcttatccccaggaacta

SEQ ID NO: 1586 - DNA, 25 bp, Homo sapiens
  source 1..25: mol_type = genomic DNA
aagaactcttatccccaggaactag

SEQ ID NO: 1587 - DNA, 25 bp, Homo sapiens
  source 1..25: mol_type = genomic DNA
agaactcttatccccaggaactagt

SEQ ID NO: 1588 - DNA, 25 bp, Homo sapiens
  source 1..25: mol_type = genomic DNA
gaactcttatccccaggaactagtt

SEQ ID NO: 1589 - DNA, 25 bp, Homo sapiens
  source 1..25: mol_type = genomic DNA
aactcttatccccaggaactagttt

SEQ ID NO: 1590 - DNA, 25 bp, Homo sapiens
  source 1..25: mol_type = genomic DNA
actcttatccccaggaactagtttg

SEQ ID NO: 1591 - DNA, 25 bp, Homo sapiens
  source 1..25: mol_type = genomic DNA
ctcttatccccaggaactagtttgt

SEQ ID NO: 1592 - DNA, 25 bp, Homo sapiens
  source 1..25: mol_type = genomic DNA
tcttatccccaggaactagtttgtt

SEQ ID NO: 1593 - DNA, 25 bp, Homo sapiens
  source 1..25: mol_type = genomic DNA
cttatccccaggaactagtttgttg

SEQ ID NO: 1594 - DNA, 25 bp, Homo sapiens
  source 1..25: mol_type = genomic DNA
ttatccccaggaactagtttgttga

SEQ ID NO: 1595 - DNA, 25 bp, Homo sapiens
  source 1..25: mol_type = genomic DNA
tatccccaggaactagtttgttgaa

SEQ ID NO: 1596 - DNA, 25 bp, Homo sapiens
  source 1..25: mol_type = genomic DNA
atccccaggaactagtttgttgaat

SEQ ID NO: 1597 - DNA, 25 bp, Homo sapiens
  source 1..25: mol_type = genomic DNA
tccccaggaactagtttgttgaata

SEQ ID NO: 1598 - DNA, 25 bp, Homo sapiens
  source 1..25: mol_type = genomic DNA
ccccaggaactagtttgttgaataa

SEQ ID NO: 1599 - DNA, 25 bp, Homo sapiens
  source 1..25: mol_type = genomic DNA
cccaggaactagtttgttgaataaa

SEQ ID NO: 1600 - DNA, 25 bp, Homo sapiens
  source 1..25: mol_type = genomic DNA
ccaggaactagtttgttgaataaat

SEQ ID NO: 1601 - DNA, 25 bp, Homo sapiens
  source 1..25: mol_type = genomic DNA
caggaactagtttgttgaataaatg

SEQ ID NO: 1602 - DNA, 25 bp, Homo sapiens
  source 1..25: mol_type = genomic DNA
aggaactagtttgttgaataaatgc

SEQ ID NO: 1603 - DNA, 25 bp, Homo sapiens
  source 1..25: mol_type = genomic DNA
ggaactagtttgttgaataaatgct

SEQ ID NO: 1604 - DNA, 25 bp, Homo sapiens
  source 1..25: mol_type = genomic DNA
gaactagtttgttgaataaatgctg

SEQ ID NO: 1605 - DNA, 25 bp, Homo sapiens
  source 1..25: mol_type = genomic DNA
aactagtttgttgaataaatgctgg

SEQ ID NO: 1606 - DNA, 25 bp, Homo sapiens
  source 1..25: mol_type = genomic DNA
actagtttgttgaataaatgctggt

SEQ ID NO: 1607 - DNA, 25 bp, Homo sapiens
  source 1..25: mol_type = genomic DNA
ctagtttgttgaataaatgctggtg

SEQ ID NO: 1608 - DNA, 25 bp, Homo sapiens
  source 1..25: mol_type = genomic DNA
tagtttgttgaataaatgctggtga

SEQ ID NO: 1609 - DNA, 25 bp, Homo sapiens
  source 1..25: mol_type = genomic DNA
agtttgttgaataaatgctggtgaa

SEQ ID NO: 1610 - DNA, 25 bp, Homo sapiens
  source 1..25: mol_type = genomic DNA
gtttgttgaataaatgctggtgaat

SEQ ID NO: 1611 - DNA, 25 bp, Homo sapiens
  source 1..25: mol_type = genomic DNA
tttgttgaataaatgctggtgaatg

SEQ ID NO: 1612 - DNA, 25 bp, Homo sapiens
  source 1..25: mol_type = genomic DNA
ttgttgaataaatgctggtgaatga

SEQ ID NO: 1613 - DNA, 25 bp, Homo sapiens
  source 1..25: mol_type = genomic DNA
tgttgaataaatgctggtgaatgaa

SEQ ID NO: 1614 - DNA, 25 bp, Homo sapiens
  source 1..25: mol_type = genomic DNA
gttgaataaatgctggtgaatgaat

SEQ ID NO: 1615 - DNA, 25 bp, Homo sapiens
  source 1..25: mol_type = genomic DNA
ttgaataaatgctggtgaatgaatg

SEQ ID NO: 1616 - DNA, 25 bp, Homo sapiens
  source 1..25: mol_type = genomic DNA
tgaataaatgctggtgaatgaatga

SEQ ID NO: 1617 - DNA, 25 bp, Homo sapiens
  source 1..25: mol_type = genomic DNA
gaataaatgctggtgaatgaatgaa

SEQ ID NO: 1618 - DNA, 25 bp, Homo sapiens
  source 1..25: mol_type = genomic DNA
aataaatgctggtgaatgaatgaat

SEQ ID NO: 1619 - DNA, 25 bp, Homo sapiens
  source 1..25: mol_type = genomic DNA
ataaatgctggtgaatgaatgaatg

SEQ ID NO: 1620 - DNA, 25 bp, Homo sapiens
  source 1..25: mol_type = genomic DNA
taaatgctggtgaatgaatgaatga

SEQ ID NO: 1621 - DNA, 25 bp, Homo sapiens
  source 1..25: mol_type = genomic DNA
aaatgctggtgaatgaatgaatgat

SEQ ID NO: 1622 - DNA, 25 bp, Homo sapiens
  source 1..25: mol_type = genomic DNA
aatgctggtgaatgaatgaatgatt

SEQ ID NO: 1623 - DNA, 25 bp, Homo sapiens
  source 1..25: mol_type = genomic DNA
atgctggtgaatgaatgaatgattg

SEQ ID NO: 1624 - DNA, 25 bp, Homo sapiens
  source 1..25: mol_type = genomic DNA
tgctggtgaatgaatgaatgattga

SEQ ID NO: 1625 - DNA, 25 bp, Homo sapiens
  source 1..25: mol_type = genomic DNA
gctggtgaatgaatgaatgattgaa

SEQ ID NO: 1626 - DNA, 25 bp, Homo sapiens
  source 1..25: mol_type = genomic DNA
ctggtgaatgaatgaatgattgaac

SEQ ID NO: 1627 - DNA, 25 bp, Homo sapiens
  source 1..25: mol_type = genomic DNA
tggtgaatgaatgaatgattgaaca

SEQ ID NO: 1628 - DNA, 25 bp, Homo sapiens
  source 1..25: mol_type = genomic DNA
ggtgaatgaatgaatgattgaacag

SEQ ID NO: 1629 - DNA, 25 bp, Homo sapiens
  source 1..25: mol_type = genomic DNA
gtgaatgaatgaatgattgaacaga

SEQ ID NO: 1630 - DNA, 25 bp, Homo sapiens
  source 1..25: mol_type = genomic DNA
tgaatgaatgaatgattgaacagat

SEQ ID NO: 1631 - DNA, 25 bp, Homo sapiens
  source 1..25: mol_type = genomic DNA
gaatgaatgaatgattgaacagatg

SEQ ID NO: 1632 - DNA, 25 bp, Homo sapiens
  source 1..25: mol_type = genomic DNA
aatgaatgaatgattgaacagatga

SEQ ID NO: 1633 - DNA, 25 bp, Homo sapiens
  source 1..25: mol_type = genomic DNA
atgaatgaatgattgaacagatgaa

SEQ ID NO: 1634 - DNA, 25 bp, Homo sapiens
  source 1..25: mol_type = genomic DNA
tgaatgaatgattgaacagatgaat

SEQ ID NO: 1635 - DNA, 25 bp, Homo sapiens
  source 1..25: mol_type = genomic DNA
gaatgaatgattgaacagatgaatg

SEQ ID NO: 1636 - DNA, 25 bp, Homo sapiens
  source 1..25: mol_type = genomic DNA
aatgaatgattgaacagatgaatga

SEQ ID NO: 1637 - DNA, 25 bp, Homo sapiens
  source 1..25: mol_type = genomic DNA
atgaatgattgaacagatgaatgag

SEQ ID NO: 1638 - DNA, 25 bp, Homo sapiens
  source 1..25: mol_type = genomic DNA
tgaatgattgaacagatgaatgagt

SEQ ID NO: 1639 - DNA, 25 bp, Homo sapiens
  source 1..25: mol_type = genomic DNA
gaatgattgaacagatgaatgagtg

SEQ ID NO: 1640 - DNA, 25 bp, Homo sapiens
  source 1..25: mol_type = genomic DNA
aatgattgaacagatgaatgagtga

SEQ ID NO: 1641 - DNA, 25 bp, Homo sapiens
  source 1..25: mol_type = genomic DNA
atgattgaacagatgaatgagtgat

SEQ ID NO: 1642 - DNA, 25 bp, Homo sapiens
  source 1..25: mol_type = genomic DNA
tgattgaacagatgaatgagtgatg

SEQ ID NO: 1643 - DNA, 25 bp, Homo sapiens
  source 1..25: mol_type = genomic DNA
gattgaacagatgaatgagtgatga

SEQ ID NO: 1644 - DNA, 25 bp, Homo sapiens
  source 1..25: mol_type = genomic DNA
attgaacagatgaatgagtgatgag

SEQ ID NO: 1645 - DNA, 25 bp, Homo sapiens
  source 1..25: mol_type = genomic DNA
ttgaacagatgaatgagtgatgagt

SEQ ID NO: 1646 - DNA, 25 bp, Homo sapiens
  source 1..25: mol_type = genomic DNA
tgaacagatgaatgagtgatgagta

SEQ ID NO: 1647 - DNA, 25 bp, Homo sapiens
  source 1..25: mol_type = genomic DNA
gaacagatgaatgagtgatgagtag

SEQ ID NO: 1648 - DNA, 25 bp, Homo sapiens
  source 1..25: mol_type = genomic DNA
aacagatgaatgagtgatgagtaga

SEQ ID NO: 1649 - DNA, 25 bp, Homo sapiens
  source 1..25: mol_type = genomic DNA
acagatgaatgagtgatgagtagat

SEQ ID NO: 1650 - DNA, 25 bp, Homo sapiens
  source 1..25: mol_type = genomic DNA
cagatgaatgagtgatgagtagata

SEQ ID NO: 1651 - DNA, 25 bp, Homo sapiens
  source 1..25: mol_type = genomic DNA
agatgaatgagtgatgagtagataa

SEQ ID NO: 1652 - DNA, 25 bp, Homo sapiens
  source 1..25: mol_type = genomic DNA
gatgaatgagtgatgagtagataaa

SEQ ID NO: 1653 - DNA, 25 bp, Homo sapiens
  source 1..25: mol_type = genomic DNA
atgaatgagtgatgagtagataaaa

SEQ ID NO: 1654 - DNA, 25 bp, Homo sapiens
  source 1..25: mol_type = genomic DNA
tgaatgagtgatgagtagataaaag

SEQ ID NO: 1655 - DNA, 25 bp, Homo sapiens
  source 1..25: mol_type = genomic DNA
gaatgagtgatgagtagataaaagg

SEQ ID NO: 1656 - DNA, 25 bp, Homo sapiens
  source 1..25: mol_type = genomic DNA
aatgagtgatgagtagataaaagga

SEQ ID NO: 1657 - DNA, 25 bp, Homo sapiens
  source 1..25: mol_type = genomic DNA
atgagtgatgagtagataaaaggat

SEQ ID NO: 1658 - DNA, 25 bp, Homo sapiens
  source 1..25: mol_type = genomic DNA
tgagtgatgagtagataaaaggatg

SEQ ID NO: 1659 - DNA, 25 bp, Homo sapiens
  source 1..25: mol_type = genomic DNA
gagtgatgagtagataaaaggatgg

SEQ ID NO: 1660 - DNA, 25 bp, Homo sapiens
  source 1..25: mol_type = genomic DNA
agtgatgagtagataaaaggatgga

SEQ ID NO: 1661 - DNA, 25 bp, Homo sapiens
  source 1..25: mol_type = genomic DNA
gtgatgagtagataaaaggatggat

SEQ ID NO: 1662 - DNA, 25 bp, Homo sapiens
  source 1..25: mol_type = genomic DNA
tgatgagtagataaaaggatggatg

SEQ ID NO: 1663 - DNA, 25 bp, Homo sapiens
  source 1..25: mol_type = genomic DNA
gatgagtagataaaaggatggatgg

SEQ ID NO: 1664 - DNA, 25 bp, Homo sapiens
  source 1..25: mol_type = genomic DNA
atgagtagataaaaggatggatgga

SEQ ID NO: 1665 - DNA, 25 bp, Homo sapiens
  source 1..25: mol_type = genomic DNA
tgagtagataaaaggatggatggag

SEQ ID NO: 1666 - DNA, 25 bp, Homo sapiens
  source 1..25: mol_type = genomic DNA
gagtagataaaaggatggatggaga

SEQ ID NO: 1667 - DNA, 25 bp, Homo sapiens
  source 1..25: mol_type = genomic DNA
agtagataaaaggatggatggagag

SEQ ID NO: 1668 - DNA, 25 bp, Homo sapiens
  source 1..25: mol_type = genomic DNA
gtagataaaaggatggatggagaga

SEQ ID NO: 1669 - DNA, 25 bp, Homo sapiens
  source 1..25: mol_type = genomic DNA
tagataaaaggatggatggagagat

SEQ ID NO: 1670 - DNA, 25 bp, Homo sapiens
  source 1..25: mol_type = genomic DNA
agataaaaggatggatggagagatg

SEQ ID NO: 1671 - DNA, 25 bp, Homo sapiens
  source 1..25: mol_type = genomic DNA
gataaaaggatggatggagagatgg

SEQ ID NO: 1672 - DNA, 25 bp, Homo sapiens
  source 1..25: mol_type = genomic DNA
ataaaaggatggatggagagatggg

SEQ ID NO: 1673 - DNA, 25 bp, Homo sapiens
  source 1..25: mol_type = genomic DNA
taaaaggatggatggagagatgggt

SEQ ID NO: 1674 - DNA, 25 bp, Homo sapiens
  source 1..25: mol_type = genomic DNA
aaaaggatggatggagagatgggtg

SEQ ID NO: 1675 - DNA, 25 bp, Homo sapiens
  source 1..25: mol_type = genomic DNA
aaaggatggatggagagatgggtga

SEQ ID NO: 1676 - DNA, 25 bp, Homo sapiens
  source 1..25: mol_type = genomic DNA
aaggatggatggagagatgggtgag

SEQ ID NO: 1677 - DNA, 25 bp, Homo sapiens
  source 1..25: mol_type = genomic DNA
aggatggatggagagatgggtgagt

SEQ ID NO: 1678 - DNA, 25 bp, Homo sapiens
  source 1..25: mol_type = genomic DNA
ggatggatggagagatgggtgagta

SEQ ID NO: 1679 - DNA, 25 bp, Homo sapiens
  source 1..25: mol_type = genomic DNA
gatggatggagagatgggtgagtac

SEQ ID NO: 1680 - DNA, 25 bp, Homo sapiens
  source 1..25: mol_type = genomic DNA
atggatggagagatgggtgagtaca

SEQ ID NO: 1681 - DNA, 25 bp, Homo sapiens
  source 1..25: mol_type = genomic DNA
tggatggagagatgggtgagtacat

SEQ ID NO: 1682 - DNA, 25 bp, Homo sapiens
  source 1..25: mol_type = genomic DNA
ggatggagagatgggtgagtacatg

SEQ ID NO: 1683 - DNA, 25 bp, Homo sapiens
  source 1..25: mol_type = genomic DNA
gatggagagatgggtgagtacatgg

SEQ ID NO: 1684 - DNA, 25 bp, Homo sapiens
  source 1..25: mol_type = genomic DNA
atggagagatgggtgagtacatgga

SEQ ID NO: 1685 - DNA, 25 bp, Homo sapiens
  source 1..25: mol_type = genomic DNA
tggagagatgggtgagtacatggat

SEQ ID NO: 1686 - DNA, 25 bp, Homo sapiens
  source 1..25: mol_type = genomic DNA
ggagagatgggtgagtacatggatg

SEQ ID NO: 1687 - DNA, 25 bp, Homo sapiens
  source 1..25: mol_type = genomic DNA
gagagatgggtgagtacatggatgg

SEQ ID NO: 1688 - DNA, 25 bp, Homo sapiens
  source 1..25: mol_type = genomic DNA
agagatgggtgagtacatggatgga

SEQ ID NO: 1689 - DNA, 25 bp, Homo sapiens
  source 1..25: mol_type = genomic DNA
gagatgggtgagtacatggatggat

SEQ ID NO: 1690 - DNA, 25 bp, Homo sapiens
  source 1..25: mol_type = genomic DNA
agatgggtgagtacatggatggata

SEQ ID NO: 1691 - DNA, 25 bp, Homo sapiens
  source 1..25: mol_type = genomic DNA
gatgggtgagtacatggatggatag

SEQ ID NO: 1692 - DNA, 25 bp, Homo sapiens
  source 1..25: mol_type = genomic DNA
atgggtgagtacatggatggataga

SEQ ID NO: 1693 - DNA, 25 bp, Homo sapiens
  source 1..25: mol_type = genomic DNA
tgggtgagtacatggatggatagat

SEQ ID NO: 1694 - DNA, 25 bp, Homo sapiens
  source 1..25: mol_type = genomic DNA
gggtgagtacatggatggatagatg

SEQ ID NO: 1695 - DNA, 25 bp, Homo sapiens
  source 1..25: mol_type = genomic DNA
ggtgagtacatggatggatagatgg

SEQ ID NO: 1696 - DNA, 25 bp, Homo sapiens
  source 1..25: mol_type = genomic DNA
gtgagtacatggatggatagatgga

SEQ ID NO: 1697 - DNA, 25 bp, Homo sapiens
  source 1..25: mol_type = genomic DNA
tgagtacatggatggatagatggat

SEQ ID NO: 1698 - DNA, 25 bp, Homo sapiens
  source 1..25: mol_type = genomic DNA
gagtacatggatggatagatggatg

SEQ ID NO: 1699 - DNA, 25 bp, Homo sapiens
  source 1..25: mol_type = genomic DNA
agtacatggatggatagatggatga

SEQ ID NO: 1700 - DNA, 25 bp, Homo sapiens
  source 1..25: mol_type = genomic DNA
gtacatggatggatagatggatgag

SEQ ID NO: 1701 - DNA, 25 bp, Homo sapiens
  source 1..25: mol_type = genomic DNA
tacatggatggatagatggatgagt

SEQ ID NO: 1702 - DNA, 25 bp, Homo sapiens
  source 1..25: mol_type = genomic DNA
acatggatggatagatggatgagtt

SEQ ID NO: 1703 - DNA, 25 bp, Homo sapiens
  source 1..25: mol_type = genomic DNA
catggatggatagatggatgagttg

SEQ ID NO: 1704 - DNA, 25 bp, Homo sapiens
  source 1..25: mol_type = genomic DNA
atggatggatagatggatgagttgg

SEQ ID NO: 1705 - DNA, 25 bp, Homo sapiens
  source 1..25: mol_type = genomic DNA
tggatggatagatggatgagttggt

SEQ ID NO: 1706 - DNA, 25 bp, Homo sapiens
  source 1..25: mol_type = genomic DNA
ggatggatagatggatgagttggtg

SEQ ID NO: 1707 - DNA, 25 bp, Homo sapiens
  source 1..25: mol_type = genomic DNA
gatggatagatggatgagttggtgg

SEQ ID NO: 1708 - DNA, 25 bp, Homo sapiens
  source 1..25: mol_type = genomic DNA
atggatagatggatgagttggtggg

SEQ ID NO: 1709 - DNA, 25 bp, Homo sapiens
  source 1..25: mol_type = genomic DNA
tggatagatggatgagttggtgggt

SEQ ID NO: 1710 - DNA, 25 bp, Homo sapiens
  source 1..25: mol_type = genomic DNA
ggatagatggatgagttggtgggta

SEQ ID NO: 1711 - DNA, 25 bp, Homo sapiens
  source 1..25: mol_type = genomic DNA
gatagatggatgagttggtgggtag

SEQ ID NO: 1712 - DNA, 25 bp, Homo sapiens
  source 1..25: mol_type = genomic DNA
atagatggatgagttggtgggtaga

SEQ ID NO: 1713 - DNA, 25 bp, Homo sapiens
  source 1..25: mol_type = genomic DNA
tagatggatgagttggtgggtagat

SEQ ID NO: 1714 - DNA, 25 bp, Homo sapiens
  source 1..25: mol_type = genomic DNA
agatggatgagttggtgggtagatt

SEQ ID NO: 1715 - DNA, 25 bp, Homo sapiens
  source 1..25: mol_type = genomic DNA
gatggatgagttggtgggtagattc

SEQ ID NO: 1716 - DNA, 25 bp, Homo sapiens
  source 1..25: mol_type = genomic DNA
atggatgagttggtgggtagattcg

SEQ ID NO: 1717 - DNA, 25 bp, Homo sapiens
  source 1..25: mol_type = genomic DNA
tggatgagttggtgggtagattcgt

SEQ ID NO: 1718 - DNA, 25 bp, Homo sapiens
  source 1..25: mol_type = genomic DNA
ggatgagttggtgggtagattcgtg

SEQ ID NO: 1719 - DNA, 25 bp, Homo sapiens
  source 1..25: mol_type = genomic DNA
gatgagttggtgggtagattcgtgg

SEQ ID NO: 1720 - DNA, 25 bp, Homo sapiens
  source 1..25: mol_type = genomic DNA
atgagttggtgggtagattcgtggc

SEQ ID NO: 1721 - DNA, 25 bp, Homo sapiens
  source 1..25: mol_type = genomic DNA
tgagttggtgggtagattcgtggct

SEQ ID NO: 1722 - DNA, 25 bp, Homo sapiens
  source 1..25: mol_type = genomic DNA
gagttggtgggtagattcgtggcta

SEQ ID NO: 1723 - DNA, 25 bp, Homo sapiens
  source 1..25: mol_type = genomic DNA
agttggtgggtagattcgtggctag

SEQ ID NO: 1724 - DNA, 25 bp, Homo sapiens
  source 1..25: mol_type = genomic DNA
gttggtgggtagattcgtggctaga

SEQ ID NO: 1725 - DNA, 25 bp, Homo sapiens
  source 1..25: mol_type = genomic DNA
ttggtgggtagattcgtggctagat

SEQ ID NO: 1726 - DNA, 25 bp, Homo sapiens
  source 1..25: mol_type = genomic DNA
tggtgggtagattcgtggctagatg

SEQ ID NO: 1727 - DNA, 25 bp, Homo sapiens
  source 1..25: mol_type = genomic DNA
ggtgggtagattcgtggctagatgg

SEQ ID NO: 1728 - DNA, 25 bp, Homo sapiens
  source 1..25: mol_type = genomic DNA
gtgggtagattcgtggctagatgga

SEQ ID NO: 1729 - DNA, 25 bp, Homo sapiens
  source 1..25: mol_type = genomic DNA
tgggtagattcgtggctagatggat

SEQ ID NO: 1730 - DNA, 25 bp, Homo sapiens
  source 1..25: mol_type = genomic DNA
gggtagattcgtggctagatggatg

SEQ ID NO: 1731 - DNA, 25 bp, Homo sapiens
  source 1..25: mol_type = genomic DNA
ggtagattcgtggctagatggatga

SEQ ID NO: 1732 - DNA, 25 bp, Homo sapiens
  source 1..25: mol_type = genomic DNA
gtagattcgtggctagatggatgat

SEQ ID NO: 1733 - DNA, 25 bp, Homo sapiens
  source 1..25: mol_type = genomic DNA
tagattcgtggctagatggatgatg

SEQ ID NO: 1734 - DNA, 25 bp, Homo sapiens
  source 1..25: mol_type = genomic DNA
agattcgtggctagatggatgatgg

SEQ ID NO: 1735 - DNA, 25 bp, Homo sapiens
  source 1..25: mol_type = genomic DNA
gattcgtggctagatggatgatgga

SEQ ID NO: 1736 - DNA, 25 bp, Homo sapiens
  source 1..25: mol_type = genomic DNA
attcgtggctagatggatgatggat

SEQ ID NO: 1737 - DNA, 25 bp, Homo sapiens
  source 1..25: mol_type = genomic DNA
ttcgtggctagatggatgatggatg

SEQ ID NO: 1738 - DNA, 25 bp, Homo sapiens
  source 1..25: mol_type = genomic DNA
tcgtggctagatggatgatggatgg

SEQ ID NO: 1739 - DNA, 25 bp, Homo sapiens
  source 1..25: mol_type = genomic DNA
cgtggctagatggatgatggatgga

SEQ ID NO: 1740 - DNA, 25 bp, Homo sapiens
  source 1..25: mol_type = genomic DNA
gtggctagatggatgatggatggat

SEQ ID NO: 1741 - DNA, 25 bp, Homo sapiens
  source 1..25: mol_type = genomic DNA
tggctagatggatgatggatggatg

SEQ ID NO: 1742 - DNA, 25 bp, Homo sapiens
  source 1..25: mol_type = genomic DNA
ggctagatggatgatggatggatgg

SEQ ID NO: 1743 - DNA, 25 bp, Homo sapiens
  source 1..25: mol_type = genomic DNA
gctagatggatgatggatggatgga

SEQ ID NO: 1744 - DNA, 25 bp, Homo sapiens
  source 1..25: mol_type = genomic DNA
ctagatggatgatggatggatggac

SEQ ID NO: 1745 - DNA, 25 bp, Homo sapiens
  source 1..25: mol_type = genomic DNA
tagatggatgatggatggatggaca

SEQ ID NO: 1746 - DNA, 25 bp, Homo sapiens
  source 1..25: mol_type = genomic DNA
agatggatgatggatggatggacag

SEQ ID NO: 1747 - DNA, 25 bp, Homo sapiens
  source 1..25: mol_type = genomic DNA
gatggatgatggatggatggacaga

SEQ ID NO: 1748 - DNA, 25 bp, Homo sapiens
  source 1..25: mol_type = genomic DNA
atggatgatggatggatggacagat

SEQ ID NO: 1749 - DNA, 25 bp, Homo sapiens
  source 1..25: mol_type = genomic DNA
tggatgatggatggatggacagatg

SEQ ID NO: 1750 - DNA, 25 bp, Homo sapiens
  source 1..25: mol_type = genomic DNA
ggatgatggatggatggacagatgg

SEQ ID NO: 1751 - DNA, 25 bp, Homo sapiens
  source 1..25: mol_type = genomic DNA
gatgatggatggatggacagatgga

SEQ ID NO: 1752 - DNA, 25 bp, Homo sapiens
  source 1..25: mol_type = genomic DNA
atgatggatggatggacagatggat

SEQ ID NO: 1753 - DNA, 25 bp, Homo sapiens
  source 1..25: mol_type = genomic DNA
tgatggatggatggacagatggatg

SEQ ID NO: 1754 - DNA, 25 bp, Homo sapiens
  source 1..25: mol_type = genomic DNA
gatggatggatggacagatggatgg

SEQ ID NO: 1755 - DNA, 25 bp, Homo sapiens
  source 1..25: mol_type = genomic DNA
atggatggatggacagatggatgga

SEQ ID NO: 1756 - DNA, 25 bp, Homo sapiens
  source 1..25: mol_type = genomic DNA
tggatggatggacagatggatggat

SEQ ID NO: 1757 - DNA, 25 bp, Homo sapiens
  source 1..25: mol_type = genomic DNA
ggatggatggacagatggatggata

SEQ ID NO: 1758 - DNA, 25 bp, Homo sapiens
  source 1..25: mol_type = genomic DNA
gatggatggacagatggatggatat

SEQ ID NO: 1759 - DNA, 25 bp, Homo sapiens
  source 1..25: mol_type = genomic DNA
atggatggacagatggatggatata

SEQ ID NO: 1760 - DNA, 25 bp, Homo sapiens
  source 1..25: mol_type = genomic DNA
tggatggacagatggatggatatat

SEQ ID NO: 1761 - DNA, 25 bp, Homo sapiens
  source 1..25: mol_type = genomic DNA
ggatggacagatggatggatatatg

SEQ ID NO: 1762 - DNA, 25 bp, Homo sapiens
  source 1..25: mol_type = genomic DNA
gatggacagatggatggatatatga

SEQ ID NO: 1763 - DNA, 25 bp, Homo sapiens
  source 1..25: mol_type = genomic DNA
atggacagatggatggatatatgat

SEQ ID NO: 1764 - DNA, 25 bp, Homo sapiens
  source 1..25: mol_type = genomic DNA
tggacagatggatggatatatgatt

SEQ ID NO: 1765 - DNA, 25 bp, Homo sapiens
  source 1..25: mol_type = genomic DNA
ggacagatggatggatatatgattg

SEQ ID NO: 1766 - DNA, 25 bp, Homo sapiens
  source 1..25: mol_type = genomic DNA
gacagatggatggatatatgattga

SEQ ID NO: 1767 - DNA, 25 bp, Homo sapiens
  source 1..25: mol_type = genomic DNA
acagatggatggatatatgattgaa

SEQ ID NO: 1768 - DNA, 25 bp, Homo sapiens
  source 1..25: mol_type = genomic DNA
cagatggatggatatatgattgaac

SEQ ID NO: 1769 - DNA, 25 bp, Homo sapiens
  source 1..25: mol_type = genomic DNA
agatggatggatatatgattgaact

SEQ ID NO: 1770 - DNA, 25 bp, Homo sapiens
  source 1..25: mol_type = genomic DNA
gatggatggatatatgattgaacta

SEQ ID NO: 1771 - DNA, 25 bp, Homo sapiens
  source 1..25: mol_type = genomic DNA
atggatggatatatgattgaactat

SEQ ID NO: 1772 - DNA, 25 bp, Homo sapiens
  source 1..25: mol_type = genomic DNA
tggatggatatatgattgaactatt

SEQ ID NO: 1773 - DNA, 25 bp, Homo sapiens
  source 1..25: mol_type = genomic DNA
ggatggatatatgattgaactattg

SEQ ID NO: 1774 - DNA, 25 bp, Homo sapiens
  source 1..25: mol_type = genomic DNA
gatggatatatgattgaactattga

SEQ ID NO: 1775 - DNA, 25 bp, Homo sapiens
  source 1..25: mol_type = genomic DNA
atggatatatgattgaactattgaa

SEQ ID NO: 1776 - DNA, 25 bp, Homo sapiens
  source 1..25: mol_type = genomic DNA
tggatatatgattgaactattgaaa

SEQ ID NO: 1777 - DNA, 25 bp, Homo sapiens
  source 1..25: mol_type = genomic DNA
ggatatatgattgaactattgaaag

SEQ ID NO: 1778 - DNA, 25 bp, Homo sapiens
  source 1..25: mol_type = genomic DNA
gatatatgattgaactattgaaagt

SEQ ID NO: 1779 - DNA, 25 bp, Homo sapiens
  source 1..25: mol_type = genomic DNA
atatatgattgaactattgaaagta

SEQ ID NO: 1780 - DNA, 25 bp, Homo sapiens
  source 1..25: mol_type = genomic DNA
tatatgattgaactattgaaagtat

SEQ ID NO: 1781 - DNA, 25 bp, Homo sapiens
  source 1..25: mol_type = genomic DNA
atatgattgaactattgaaagtata

SEQ ID NO: 1782 - DNA, 25 bp, Homo sapiens
  source 1..25: mol_type = genomic DNA
tatgattgaactattgaaagtatag

SEQ ID NO: 1783 - DNA, 25 bp, Homo sapiens
  source 1..25: mol_type = genomic DNA
atgattgaactattgaaagtataga

SEQ ID NO: 1784 - DNA, 25 bp, Homo sapiens
  source 1..25: mol_type = genomic DNA
tgattgaactattgaaagtatagat

SEQ ID NO: 1785 - DNA, 25 bp, Homo sapiens
  source 1..25: mol_type = genomic DNA
gattgaactattgaaagtatagatg

SEQ ID NO: 1786 - DNA, 25 bp, Homo sapiens
  source 1..25: mol_type = genomic DNA
attgaactattgaaagtatagatgt

SEQ ID NO: 1787 - DNA, 25 bp, Homo sapiens
  source 1..25: mol_type = genomic DNA
ttgaactattgaaagtatagatgta

SEQ ID NO: 1788 - DNA, 25 bp, Homo sapiens
  source 1..25: mol_type = genomic DNA
tgaactattgaaagtatagatgtat

SEQ ID NO: 1789 - DNA, 25 bp, Homo sapiens
  source 1..25: mol_type = genomic DNA
gaactattgaaagtatagatgtatg

SEQ ID NO: 1790 - DNA, 25 bp, Homo sapiens
  source 1..25: mol_type = genomic DNA
aactattgaaagtatagatgtatgg

SEQ ID NO: 1791 - DNA, 25 bp, Homo sapiens
  source 1..25: mol_type = genomic DNA
actattgaaagtatagatgtatgga

SEQ ID NO: 1792 - DNA, 25 bp, Homo sapiens
  source 1..25: mol_type = genomic DNA
ctattgaaagtatagatgtatggat

SEQ ID NO: 1793 - DNA, 25 bp, Homo sapiens
  source 1..25: mol_type = genomic DNA
tattgaaagtatagatgtatggatg

SEQ ID NO: 1794 - DNA, 25 bp, Homo sapiens
  source 1..25: mol_type = genomic DNA
attgaaagtatagatgtatggatgg

SEQ ID NO: 1795 - DNA, 25 bp, Homo sapiens
  source 1..25: mol_type = genomic DNA
ttgaaagtatagatgtatggatggg

SEQ ID NO: 1796 - DNA, 25 bp, Homo sapiens
  source 1..25: mol_type = genomic DNA
tgaaagtatagatgtatggatgggt

SEQ ID NO: 1797 - DNA, 25 bp, Homo sapiens
  source 1..25: mol_type = genomic DNA
gaaagtatagatgtatggatgggtg

SEQ ID NO: 1798 - DNA, 25 bp, Homo sapiens
  source 1..25: mol_type = genomic DNA
aaagtatagatgtatggatgggtga

SEQ ID NO: 1799 - DNA, 25 bp, Homo sapiens
  source 1..25: mol_type = genomic DNA
aagtatagatgtatggatgggtgaa

SEQ ID NO: 1800 - DNA, 25 bp, Homo sapiens
  source 1..25: mol_type = genomic DNA
agtatagatgtatggatgggtgaat

SEQ ID NO: 1801 - DNA, 25 bp, Homo sapiens
  source 1..25: mol_type = genomic DNA
gtatagatgtatggatgggtgaatt

SEQ ID NO: 1802 - DNA, 25 bp, Homo sapiens
  source 1..25: mol_type = genomic DNA
tatagatgtatggatgggtgaattt

SEQ ID NO: 1803 - DNA, 25 bp, Homo sapiens
  source 1..25: mol_type = genomic DNA
atagatgtatggatgggtgaatttg

SEQ ID NO: 1804 - DNA, 25 bp, Homo sapiens
  source 1..25: mol_type = genomic DNA
tagatgtatggatgggtgaatttgg

SEQ ID NO: 1805 - DNA, 25 bp, Homo sapiens
  source 1..25: mol_type = genomic DNA
agatgtatggatgggtgaatttggg

SEQ ID NO: 1806 - DNA, 25 bp, Homo sapiens
  source 1..25: mol_type = genomic DNA
gatgtatggatgggtgaatttgggg

SEQ ID NO: 1807 - DNA, 25 bp, Homo sapiens
  source 1..25: mol_type = genomic DNA
atgtatggatgggtgaatttggggg

SEQ ID NO: 1808 - DNA, 25 bp, Homo sapiens
  source 1..25: mol_type = genomic DNA
tgtatggatgggtgaatttgggggt

SEQ ID NO: 1809 - DNA, 25 bp, Homo sapiens
  source 1..25: mol_type = genomic DNA
gtatggatgggtgaatttgggggta

SEQ ID NO: 1810 - DNA, 25 bp, Homo sapiens
  source 1..25: mol_type = genomic DNA
tatggatgggtgaatttgggggtaa

SEQ ID NO: 1811 - DNA, 25 bp, Homo sapiens
  source 1..25: mol_type = genomic DNA
atggatgggtgaatttgggggtaat

SEQ ID NO: 1812 - DNA, 25 bp, Homo sapiens
  source 1..25: mol_type = genomic DNA
tggatgggtgaatttgggggtaatt

SEQ ID NO: 1813 - DNA, 25 bp, Homo sapiens
  source 1..25: mol_type = genomic DNA
ggatgggtgaatttgggggtaattg

SEQ ID NO: 1814 - DNA, 25 bp, Homo sapiens
  source 1..25: mol_type = genomic DNA
gatgggtgaatttgggggtaattgt

SEQ ID NO: 1815 - DNA, 25 bp, Homo sapiens
  source 1..25: mol_type = genomic DNA
atgggtgaatttgggggtaattgtt

SEQ ID NO: 1816 - DNA, 25 bp, Homo sapiens
  source 1..25: mol_type = genomic DNA
tgggtgaatttgggggtaattgtta

SEQ ID NO: 1817 - DNA, 25 bp, Homo sapiens
  source 1..25: mol_type = genomic DNA
gggtgaatttgggggtaattgttag

SEQ ID NO: 1818 - DNA, 25 bp, Homo sapiens
  source 1..25: mol_type = genomic DNA
ggtgaatttgggggtaattgttaga

SEQ ID NO: 1819 - DNA, 25 bp, Homo sapiens
  source 1..25: mol_type = genomic DNA
gtgaatttgggggtaattgttagat

SEQ ID NO: 1820 - DNA, 25 bp, Homo sapiens
  source 1..25: mol_type = genomic DNA
tgaatttgggggtaattgttagatg

SEQ ID NO: 1821 - DNA, 25 bp, Homo sapiens
  source 1..25: mol_type = genomic DNA
gaatttgggggtaattgttagatga

SEQ ID NO: 1822 - DNA, 25 bp, Homo sapiens
  source 1..25: mol_type = genomic DNA
aatttgggggtaattgttagatgat

SEQ ID NO: 1823 - DNA, 25 bp, Homo sapiens
  source 1..25: mol_type = genomic DNA
atttgggggtaattgttagatgatg

SEQ ID NO: 1824 - DNA, 25 bp, Homo sapiens
  source 1..25: mol_type = genomic DNA
tttgggggtaattgttagatgatgg

SEQ ID NO: 1825 - DNA, 25 bp, Homo sapiens
  source 1..25: mol_type = genomic DNA
ttgggggtaattgttagatgatgga

SEQ ID NO: 1826 - DNA, 25 bp, Homo sapiens
  source 1..25: mol_type = genomic DNA
tgggggtaattgttagatgatggat

SEQ ID NO: 1827 - DNA, 25 bp, Homo sapiens
  source 1..25: mol_type = genomic DNA
gggggtaattgttagatgatggatg

SEQ ID NO: 1828 - DNA, 25 bp, Homo sapiens
  source 1..25: mol_type = genomic DNA
ggggtaattgttagatgatggatga

SEQ ID NO: 1829 - DNA, 25 bp, Homo sapiens
  source 1..25: mol_type = genomic DNA
gggtaattgttagatgatggatgag

SEQ ID NO: 1830 - DNA, 25 bp, Homo sapiens
  source 1..25: mol_type = genomic DNA
ggtaattgttagatgatggatgagt

SEQ ID NO: 1831 - DNA, 25 bp, Homo sapiens
  source 1..25: mol_type = genomic DNA
gtaattgttagatgatggatgagta

SEQ ID NO: 1832 - DNA, 25 bp, Homo sapiens
  source 1..25: mol_type = genomic DNA
taattgttagatgatggatgagtat

SEQ ID NO: 1833 - DNA, 25 bp, Homo sapiens
  source 1..25: mol_type = genomic DNA
aattgttagatgatggatgagtata

SEQ ID NO: 1834 - DNA, 25 bp, Homo sapiens
  source 1..25: mol_type = genomic DNA
attgttagatgatggatgagtatag

SEQ ID NO: 1835 - DNA, 25 bp, Homo sapiens
  source 1..25: mol_type = genomic DNA
ttgttagatgatggatgagtataga

SEQ ID NO: 1836 - DNA, 25 bp, Homo sapiens
  source 1..25: mol_type = genomic DNA
tgttagatgatggatgagtatagat

SEQ ID NO: 1837 - DNA, 25 bp, Homo sapiens
  source 1..25: mol_type = genomic DNA
gttagatgatggatgagtatagatg

SEQ ID NO: 1838 - DNA, 25 bp, Homo sapiens
  source 1..25: mol_type = genomic DNA
ttagatgatggatgagtatagatga

SEQ ID NO: 1839 - DNA, 25 bp, Homo sapiens
  source 1..25: mol_type = genomic DNA
tagatgatggatgagtatagatgaa

SEQ ID NO: 1840 - DNA, 25 bp, Homo sapiens
  source 1..25: mol_type = genomic DNA
agatgatggatgagtatagatgaat

SEQ ID NO: 1841 - DNA, 25 bp, Homo sapiens
  source 1..25: mol_type = genomic DNA
gatgatggatgagtatagatgaatg

SEQ ID NO: 1842 - DNA, 25 bp, Homo sapiens
  source 1..25: mol_type = genomic DNA
atgatggatgagtatagatgaatga

SEQ ID NO: 1843 - DNA, 25 bp, Homo sapiens
  source 1..25: mol_type = genomic DNA
tgatggatgagtatagatgaatgat

SEQ ID NO: 1844 - DNA, 25 bp, Homo sapiens
  source 1..25: mol_type = genomic DNA
gatggatgagtatagatgaatgatg

SEQ ID NO: 1845 - DNA, 25 bp, Homo sapiens
  source 1..25: mol_type = genomic DNA
atggatgagtatagatgaatgatgg

SEQ ID NO: 1846 - DNA, 25 bp, Homo sapiens
  source 1..25: mol_type = genomic DNA
tggatgagtatagatgaatgatgga

SEQ ID NO: 1847 - DNA, 25 bp, Homo sapiens
  source 1..25: mol_type = genomic DNA
ggatgagtatagatgaatgatggat

SEQ ID NO: 1848 - DNA, 25 bp, Homo sapiens
  source 1..25: mol_type = genomic DNA
gatgagtatagatgaatgatggatg

SEQ ID NO: 1849 - DNA, 25 bp, Homo sapiens
  source 1..25: mol_type = genomic DNA
atgagtatagatgaatgatggatgg

SEQ ID NO: 1850 - DNA, 25 bp, Homo sapiens
  source 1..25: mol_type = genomic DNA
tgagtatagatgaatgatggatgga

SEQ ID NO: 1851 - DNA, 25 bp, Homo sapiens
  source 1..25: mol_type = genomic DNA
gagtatagatgaatgatggatggat

SEQ ID NO: 1852 - DNA, 25 bp, Homo sapiens
  source 1..25: mol_type = genomic DNA
agtatagatgaatgatggatggata

SEQ ID NO: 1853 - DNA, 25 bp, Homo sapiens
  source 1..25: mol_type = genomic DNA
gtatagatgaatgatggatggataa

SEQ ID NO: 1854 - DNA, 25 bp, Homo sapiens
  source 1..25: mol_type = genomic DNA
tatagatgaatgatggatggataac

SEQ ID NO: 1855 - DNA, 25 bp, Homo sapiens
  source 1..25: mol_type = genomic DNA
atagatgaatgatggatggataact

SEQ ID NO: 1856 - DNA, 25 bp, Homo sapiens
  source 1..25: mol_type = genomic DNA
tagatgaatgatggatggataactt

SEQ ID NO: 1857 - DNA, 25 bp, Homo sapiens
  source 1..25: mol_type = genomic DNA
agatgaatgatggatggataacttg

SEQ ID NO: 1858 - DNA, 25 bp, Homo sapiens
  source 1..25: mol_type = genomic DNA
gatgaatgatggatggataacttga

SEQ ID NO: 1859 - DNA, 25 bp, Homo sapiens
  source 1..25: mol_type = genomic DNA
atgaatgatggatggataacttgat

SEQ ID NO: 1860 - DNA, 25 bp, Homo sapiens
  source 1..25: mol_type = genomic DNA
tgaatgatggatggataacttgatg

SEQ ID NO: 1861 - DNA, 25 bp, Homo sapiens
  source 1..25: mol_type = genomic DNA
gaatgatggatggataacttgatga

SEQ ID NO: 1862 - DNA, 25 bp, Homo sapiens
  source 1..25: mol_type = genomic DNA
aatgatggatggataacttgatgag

SEQ ID NO: 1863 - DNA, 25 bp, Homo sapiens
  source 1..25: mol_type = genomic DNA
atgatggatggataacttgatgagt

SEQ ID NO: 1864 - DNA, 25 bp, Homo sapiens
  source 1..25: mol_type = genomic DNA
tgatggatggataacttgatgagtg

SEQ ID NO: 1865 - DNA, 25 bp, Homo sapiens
  source 1..25: mol_type = genomic DNA
gatggatggataacttgatgagtgg

SEQ ID NO: 1866 - DNA, 25 bp, Homo sapiens
  source 1..25: mol_type = genomic DNA
atggatggataacttgatgagtgga

SEQ ID NO: 1867 - DNA, 25 bp, Homo sapiens
  source 1..25: mol_type = genomic DNA
tggatggataacttgatgagtggat

SEQ ID NO: 1868 - DNA, 25 bp, Homo sapiens
  source 1..25: mol_type = genomic DNA
ggatggataacttgatgagtggata

SEQ ID NO: 1869 - DNA, 25 bp, Homo sapiens
  source 1..25: mol_type = genomic DNA
gatggataacttgatgagtggatag

SEQ ID NO: 1870 - DNA, 25 bp, Homo sapiens
  source 1..25: mol_type = genomic DNA
atggataacttgatgagtggataga

SEQ ID NO: 1871 - DNA, 25 bp, Homo sapiens
  source 1..25: mol_type = genomic DNA
tggataacttgatgagtggatagat

SEQ ID NO: 1872 - DNA, 25 bp, Homo sapiens
  source 1..25: mol_type = genomic DNA
ggataacttgatgagtggatagata

SEQ ID NO: 1873 - DNA, 25 bp, Homo sapiens
  source 1..25: mol_type = genomic DNA
gataacttgatgagtggatagatag

SEQ ID NO: 1874 - DNA, 25 bp, Homo sapiens
  source 1..25: mol_type = genomic DNA
ataacttgatgagtggatagataga

SEQ ID NO: 1875 - DNA, 25 bp, Homo sapiens
  source 1..25: mol_type = genomic DNA
taacttgatgagtggatagatagat

SEQ ID NO: 1876 - DNA, 25 bp, Homo sapiens
  source 1..25: mol_type = genomic DNA
aacttgatgagtggatagatagatt

SEQ ID NO: 1877 - DNA, 25 bp, Homo sapiens
  source 1..25: mol_type = genomic DNA
acttgatgagtggatagatagattg

SEQ ID NO: 1878 - DNA, 25 bp, Homo sapiens
  source 1..25: mol_type = genomic DNA
cttgatgagtggatagatagattgc

SEQ ID NO: 1879 - DNA, 25 bp, Homo sapiens
  source 1..25: mol_type = genomic DNA
ttgatgagtggatagatagattgct

SEQ ID NO: 1880 - DNA, 25 bp, Homo sapiens
  source 1..25: mol_type = genomic DNA
tgatgagtggatagatagattgctg

SEQ ID NO: 1881 - DNA, 25 bp, Homo sapiens
  source 1..25: mol_type = genomic DNA
gatgagtggatagatagattgctgg

SEQ ID NO: 1882 - DNA, 25 bp, Homo sapiens
  source 1..25: mol_type = genomic DNA
atgagtggatagatagattgctgga

SEQ ID NO: 1883 - DNA, 25 bp, Homo sapiens
  source 1..25: mol_type = genomic DNA
tgagtggatagatagattgctggat

SEQ ID NO: 1884 - DNA, 25 bp, Homo sapiens
  source 1..25: mol_type = genomic DNA
gagtggatagatagattgctggata

SEQ ID NO: 1885 - DNA, 25 bp, Homo sapiens
  source 1..25: mol_type = genomic DNA
agtggatagatagattgctggatag

SEQ ID NO: 1886 - DNA, 25 bp, Homo sapiens
  source 1..25: mol_type = genomic DNA
gtggatagatagattgctggataga

SEQ ID NO: 1887 - DNA, 25 bp, Homo sapiens
  source 1..25: mol_type = genomic DNA
tggatagatagattgctggatagat

SEQ ID NO: 1888 - DNA, 25 bp, Homo sapiens
  source 1..25: mol_type = genomic DNA
ggatagatagattgctggatagatg

SEQ ID NO: 1889 - DNA, 25 bp, Homo sapiens
  source 1..25: mol_type = genomic DNA
gatagatagattgctggatagatga

SEQ ID NO: 1890 - DNA, 25 bp, Homo sapiens
  source 1..25: mol_type = genomic DNA
atagatagattgctggatagatgat

SEQ ID NO: 1891 - DNA, 25 bp, Homo sapiens
  source 1..25: mol_type = genomic DNA
tagatagattgctggatagatgatt

SEQ ID NO: 1892 - DNA, 25 bp, Homo sapiens
  source 1..25: mol_type = genomic DNA
agatagattgctggatagatgattg

SEQ ID NO: 1893 - DNA, 25 bp, Homo sapiens
  source 1..25: mol_type = genomic DNA
gatagattgctggatagatgattga

SEQ ID NO: 1894 - DNA, 25 bp, Homo sapiens
  source 1..25: mol_type = genomic DNA
atagattgctggatagatgattgac

SEQ ID NO: 1895 - DNA, 25 bp, Homo sapiens
  source 1..25: mol_type = genomic DNA
tagattgctggatagatgattgact

SEQ ID NO: 1896 - DNA, 25 bp, Homo sapiens
  source 1..25: mol_type = genomic DNA
agattgctggatagatgattgactg

SEQ ID NO: 1897 - DNA, 25 bp, Homo sapiens
  source 1..25: mol_type = genomic DNA
gattgctggatagatgattgactgg

SEQ ID NO: 1898 - DNA, 25 bp, Homo sapiens
  source 1..25: mol_type = genomic DNA
attgctggatagatgattgactggg

SEQ ID NO: 1899 - DNA, 25 bp, Homo sapiens
  source 1..25: mol_type = genomic DNA
ttgctggatagatgattgactgggt

SEQ ID NO: 1900 - DNA, 25 bp, Homo sapiens
  source 1..25: mol_type = genomic DNA
tgctggatagatgattgactgggtg

SEQ ID NO: 1901 - DNA, 25 bp, Homo sapiens
  source 1..25: mol_type = genomic DNA
gctggatagatgattgactgggtgg

SEQ ID NO: 1902 - DNA, 25 bp, Homo sapiens
  source 1..25: mol_type = genomic DNA
ctggatagatgattgactgggtgga

SEQ ID NO: 1903 - DNA, 25 bp, Homo sapiens
  source 1..25: mol_type = genomic DNA
tggatagatgattgactgggtggat

SEQ ID NO: 1904 - DNA, 25 bp, Homo sapiens
  source 1..25: mol_type = genomic DNA
ggatagatgattgactgggtggata

SEQ ID NO: 1905 - DNA, 25 bp, Homo sapiens
  source 1..25: mol_type = genomic DNA
gatagatgattgactgggtggatag

SEQ ID NO: 1906 - DNA, 25 bp, Homo sapiens
  source 1..25: mol_type = genomic DNA
atagatgattgactgggtggataga

SEQ ID NO: 1907 - DNA, 25 bp, Homo sapiens
  source 1..25: mol_type = genomic DNA
tagatgattgactgggtggatagat

SEQ ID NO: 1908 - DNA, 25 bp, Homo sapiens
  source 1..25: mol_type = genomic DNA
agatgattgactgggtggatagatg

SEQ ID NO: 1909 - DNA, 25 bp, Homo sapiens
  source 1..25: mol_type = genomic DNA
gatgattgactgggtggatagatga

SEQ ID NO: 1910 - DNA, 25 bp, Homo sapiens
  source 1..25: mol_type = genomic DNA
atgattgactgggtggatagatgaa

SEQ ID NO: 1911 - DNA, 25 bp, Homo sapiens
  source 1..25: mol_type = genomic DNA
tgattgactgggtggatagatgaaa

SEQ ID NO: 1912 - DNA, 25 bp, Homo sapiens
  source 1..25: mol_type = genomic DNA
gattgactgggtggatagatgaaat

SEQ ID NO: 1913 - DNA, 25 bp, Homo sapiens
  source 1..25: mol_type = genomic DNA
attgactgggtggatagatgaaatg

SEQ ID NO: 1914 - DNA, 25 bp, Homo sapiens
  source 1..25: mol_type = genomic DNA
ttgactgggtggatagatgaaatgt

SEQ ID NO: 1915 - DNA, 25 bp, Homo sapiens
  source 1..25: mol_type = genomic DNA
tgactgggtggatagatgaaatgtt

SEQ ID NO: 1916 - DNA, 25 bp, Homo sapiens
  source 1..25: mol_type = genomic DNA
gactgggtggatagatgaaatgttg

SEQ ID NO: 1917 - DNA, 25 bp, Homo sapiens
  source 1..25: mol_type = genomic DNA
actgggtggatagatgaaatgttgg

SEQ ID NO: 1918 - DNA, 25 bp, Homo sapiens
  source 1..25: mol_type = genomic DNA
ctgggtggatagatgaaatgttgga

SEQ ID NO: 1919 - DNA, 25 bp, Homo sapiens
  source 1..25: mol_type = genomic DNA
tgggtggatagatgaaatgttggat

SEQ ID NO: 1920 - DNA, 25 bp, Homo sapiens
  source 1..25: mol_type = genomic DNA
gggtggatagatgaaatgttggatg

SEQ ID NO: 1921 - DNA, 25 bp, Homo sapiens
  source 1..25: mol_type = genomic DNA
ggtggatagatgaaatgttggatga

SEQ ID NO: 1922 - DNA, 25 bp, Homo sapiens
  source 1..25: mol_type = genomic DNA
gtggatagatgaaatgttggatgag

SEQ ID NO: 1923 - DNA, 25 bp, Homo sapiens
  source 1..25: mol_type = genomic DNA
tggatagatgaaatgttggatgagc

SEQ ID NO: 1924 - DNA, 25 bp, Homo sapiens
  source 1..25: mol_type = genomic DNA
ggatagatgaaatgttggatgagca

SEQ ID NO: 1925 - DNA, 25 bp, Homo sapiens
  source 1..25: mol_type = genomic DNA
gatagatgaaatgttggatgagcag

SEQ ID NO: 1926 - DNA, 25 bp, Homo sapiens
  source 1..25: mol_type = genomic DNA
atagatgaaatgttggatgagcaga

SEQ ID NO: 1927 - DNA, 25 bp, Homo sapiens
  source 1..25: mol_type = genomic DNA
tagatgaaatgttggatgagcagat

SEQ ID NO: 1928 - DNA, 25 bp, Homo sapiens
  source 1..25: mol_type = genomic DNA
agatgaaatgttggatgagcagatt

SEQ ID NO: 1929 - DNA, 25 bp, Homo sapiens
  source 1..25: mol_type = genomic DNA
gatgaaatgttggatgagcagatta

SEQ ID NO: 1930 - DNA, 25 bp, Homo sapiens
  source 1..25: mol_type = genomic DNA
atgaaatgttggatgagcagattaa

SEQ ID NO: 1931 - DNA, 25 bp, Homo sapiens
  source 1..25: mol_type = genomic DNA
tgaaatgttggatgagcagattaag

SEQ ID NO: 1932 - DNA, 25 bp, Homo sapiens
  source 1..25: mol_type = genomic DNA
gaaatgttggatgagcagattaagt

SEQ ID NO: 1933 - DNA, 25 bp, Homo sapiens
  source 1..25: mol_type = genomic DNA
aaatgttggatgagcagattaagtt

SEQ ID NO: 1934 - DNA, 25 bp, Homo sapiens
  source 1..25: mol_type = genomic DNA
aatgttggatgagcagattaagttg

SEQ ID NO: 1935 - DNA, 25 bp, Homo sapiens
  source 1..25: mol_type = genomic DNA
atgttggatgagcagattaagttgt

SEQ ID NO: 1936 - DNA, 25 bp, Homo sapiens
  source 1..25: mol_type = genomic DNA
tgttggatgagcagattaagttgta

SEQ ID NO: 1937 - DNA, 25 bp, Homo sapiens
  source 1..25: mol_type = genomic DNA
gttggatgagcagattaagttgtat

SEQ ID NO: 1938 - DNA, 25 bp, Homo sapiens
  source 1..25: mol_type = genomic DNA
ttggatgagcagattaagttgtatt

SEQ ID NO: 1939 - DNA, 25 bp, Homo sapiens
  source 1..25: mol_type = genomic DNA
tggatgagcagattaagttgtattg

SEQ ID NO: 1940 - DNA, 25 bp, Homo sapiens
  source 1..25: mol_type = genomic DNA
ggatgagcagattaagttgtattgg

SEQ ID NO: 1941 - DNA, 25 bp, Homo sapiens
  source 1..25: mol_type = genomic DNA
gatgagcagattaagttgtattgga

SEQ ID NO: 1942 - DNA, 25 bp, Homo sapiens
  source 1..25: mol_type = genomic DNA
atgagcagattaagttgtattggat

SEQ ID NO: 1943 - DNA, 25 bp, Homo sapiens
  source 1..25: mol_type = genomic DNA
tgagcagattaagttgtattggatg

SEQ ID NO: 1944 - DNA, 25 bp, Homo sapiens
  source 1..25: mol_type = genomic DNA
gagcagattaagttgtattggatgg

SEQ ID NO: 1945 - DNA, 25 bp, Homo sapiens
  source 1..25: mol_type = genomic DNA
agcagattaagttgtattggatggg

SEQ ID NO: 1946 - DNA, 25 bp, Homo sapiens
  source 1..25: mol_type = genomic DNA
gcagattaagttgtattggatggga

SEQ ID NO: 1947 - DNA, 25 bp, Homo sapiens
  source 1..25: mol_type = genomic DNA
cagattaagttgtattggatgggat

SEQ ID NO: 1948 - DNA, 25 bp, Homo sapiens
  source 1..25: mol_type = genomic DNA
agattaagttgtattggatgggatg

SEQ ID NO: 1949 - DNA, 25 bp, Homo sapiens
  source 1..25: mol_type = genomic DNA
gattaagttgtattggatgggatgg

SEQ ID NO: 1950 - DNA, 25 bp, Homo sapiens
  source 1..25: mol_type = genomic DNA
attaagttgtattggatgggatgga

SEQ ID NO: 1951 - DNA, 25 bp, Homo sapiens
  source 1..25: mol_type = genomic DNA
ttaagttgtattggatgggatggat

SEQ ID NO: 1952 - DNA, 25 bp, Homo sapiens
  source 1..25: mol_type = genomic DNA
taagttgtattggatgggatggatg

SEQ ID NO: 1953 - DNA, 25 bp, Homo sapiens
  source 1..25: mol_type = genomic DNA
aagttgtattggatgggatggatgg

SEQ ID NO: 1954 - DNA, 25 bp, Homo sapiens
  source 1..25: mol_type = genomic DNA
agttgtattggatgggatggatgga

SEQ ID NO: 1955 - DNA, 25 bp, Homo sapiens
  source 1..25: mol_type = genomic DNA
gttgtattggatgggatggatggaa

SEQ ID NO: 1956 - DNA, 25 bp, Homo sapiens
  source 1..25: mol_type = genomic DNA
ttgtattggatgggatggatggaag

SEQ ID NO: 1957 - DNA, 25 bp, Homo sapiens
  source 1..25: mol_type = genomic DNA
tgtattggatgggatggatggaagt

SEQ ID NO: 1958 - DNA, 25 bp, Homo sapiens
  source 1..25: mol_type = genomic DNA
gtattggatgggatggatggaagtg

SEQ ID NO: 1959 - DNA, 25 bp, Homo sapiens
  source 1..25: mol_type = genomic DNA
tattggatgggatggatggaagtgt

SEQ ID NO: 1960 - DNA, 25 bp, Homo sapiens
  source 1..25: mol_type = genomic DNA
attggatgggatggatggaagtgtg

SEQ ID NO: 1961 - DNA, 25 bp, Homo sapiens
  source 1..25: mol_type = genomic DNA
ttggatgggatggatggaagtgtgg

SEQ ID NO: 1962 - DNA, 25 bp, Homo sapiens
  source 1..25: mol_type = genomic DNA
tggatgggatggatggaagtgtggt

SEQ ID NO: 1963 - DNA, 25 bp, Homo sapiens
  source 1..25: mol_type = genomic DNA
ggatgggatggatggaagtgtggtt

SEQ ID NO: 1964 - DNA, 25 bp, Homo sapiens
  source 1..25: mol_type = genomic DNA
gatgggatggatggaagtgtggttg

SEQ ID NO: 1965 - DNA, 25 bp, Homo sapiens
  source 1..25: mol_type = genomic DNA
atgggatggatggaagtgtggttga

SEQ ID NO: 1966 - DNA, 25 bp, Homo sapiens
  source 1..25: mol_type = genomic DNA
tgggatggatggaagtgtggttgag

SEQ ID NO: 1967 - DNA, 25 bp, Homo sapiens
  source 1..25: mol_type = genomic DNA
gggatggatggaagtgtggttgagt

SEQ ID NO: 1968 - DNA, 25 bp, Homo sapiens
  source 1..25: mol_type = genomic DNA
ggatggatggaagtgtggttgagtt

SEQ ID NO: 1969 - DNA, 25 bp, Homo sapiens
  source 1..25: mol_type = genomic DNA
gatggatggaagtgtggttgagtta

SEQ ID NO: 1970 - DNA, 25 bp, Homo sapiens
  source 1..25: mol_type = genomic DNA
atggatggaagtgtggttgagttat

SEQ ID NO: 1971 - DNA, 25 bp, Homo sapiens
  source 1..25: mol_type = genomic DNA
tggatggaagtgtggttgagttatt

SEQ ID NO: 1972 - DNA, 25 bp, Homo sapiens
  source 1..25: mol_type = genomic DNA
ggatggaagtgtggttgagttatta

SEQ ID NO: 1973 - DNA, 25 bp, Homo sapiens
  source 1..25: mol_type = genomic DNA
gatggaagtgtggttgagttattag

SEQ ID NO: 1974 - DNA, 25 bp, Homo sapiens
  source 1..25: mol_type = genomic DNA
atggaagtgtggttgagttattaga

SEQ ID NO: 1975 - DNA, 25 bp, Homo sapiens
  source 1..25: mol_type = genomic DNA
tggaagtgtggttgagttattagaa

SEQ ID NO: 1976 - DNA, 25 bp, Homo sapiens
  source 1..25: mol_type = genomic DNA
ggaagtgtggttgagttattagaag

SEQ ID NO: 1977 - DNA, 25 bp, Homo sapiens
  source 1..25: mol_type = genomic DNA
gaagtgtggttgagttattagaagg

SEQ ID NO: 1978 - DNA, 25 bp, Homo sapiens
  source 1..25: mol_type = genomic DNA
aagtgtggttgagttattagaagga

SEQ ID NO: 1979 - DNA, 25 bp, Homo sapiens
  source 1..25: mol_type = genomic DNA
agtgtggttgagttattagaaggaa

SEQ ID NO: 1980 - DNA, 25 bp, Homo sapiens
  source 1..25: mol_type = genomic DNA
gtgtggttgagttattagaaggaag

SEQ ID NO: 1981 - DNA, 25 bp, Homo sapiens
  source 1..25: mol_type = genomic DNA
tgtggttgagttattagaaggaaga

SEQ ID NO: 1982 - DNA, 25 bp, Homo sapiens
  source 1..25: mol_type = genomic DNA
gtggttgagttattagaaggaagat

SEQ ID NO: 1983 - DNA, 25 bp, Homo sapiens
  source 1..25: mol_type = genomic DNA
tggttgagttattagaaggaagatt

SEQ ID NO: 1984 - DNA, 25 bp, Homo sapiens
  source 1..25: mol_type = genomic DNA
ggttgagttattagaaggaagattg

SEQ ID NO: 1985 - DNA, 25 bp, Homo sapiens
  source 1..25: mol_type = genomic DNA
gttgagttattagaaggaagattga

SEQ ID NO: 1986 - DNA, 25 bp, Homo sapiens
  source 1..25: mol_type = genomic DNA
ttgagttattagaaggaagattgag

SEQ ID NO: 1987 - DNA, 25 bp, Homo sapiens
  source 1..25: mol_type = genomic DNA
tgagttattagaaggaagattgagt

SEQ ID NO: 1988 - DNA, 25 bp, Homo sapiens
  source 1..25: mol_type = genomic DNA
gagttattagaaggaagattgagta

SEQ ID NO: 1989 - DNA, 25 bp, Homo sapiens
  source 1..25: mol_type = genomic DNA
agttattagaaggaagattgagtag

SEQ ID NO: 1990 - DNA, 25 bp, Homo sapiens
  source 1..25: mol_type = genomic DNA
gttattagaaggaagattgagtaga

SEQ ID NO: 1991 - DNA, 25 bp, Homo sapiens
  source 1..25: mol_type = genomic DNA
ttattagaaggaagattgagtagat

SEQ ID NO: 1992 - DNA, 25 bp, Homo sapiens
  source 1..25: mol_type = genomic DNA
tattagaaggaagattgagtagata

SEQ ID NO: 1993 - DNA, 25 bp, Homo sapiens
  source 1..25: mol_type = genomic DNA
attagaaggaagattgagtagatag

SEQ ID NO: 1994 - DNA, 25 bp, Homo sapiens
  source 1..25: mol_type = genomic DNA
ttagaaggaagattgagtagatagg

SEQ ID NO: 1995 - DNA, 25 bp, Homo sapiens
  source 1..25: mol_type = genomic DNA
tagaaggaagattgagtagataggt

SEQ ID NO: 1996 - DNA, 25 bp, Homo sapiens
  source 1..25: mol_type = genomic DNA
agaaggaagattgagtagataggtg

SEQ ID NO: 1997 - DNA, 25 bp, Homo sapiens
  source 1..25: mol_type = genomic DNA
gaaggaagattgagtagataggtga

SEQ ID NO: 1998 - DNA, 25 bp, Homo sapiens
  source 1..25: mol_type = genomic DNA
aaggaagattgagtagataggtgaa

SEQ ID NO: 1999 - DNA, 25 bp, Homo sapiens
  source 1..25: mol_type = genomic DNA
aggaagattgagtagataggtgaat

SEQ ID NO: 2000 - DNA, 25 bp, Homo sapiens
  source 1..25: mol_type = genomic DNA
ggaagattgagtagataggtgaatt

SEQ ID NO: 2001 - DNA, 25 bp, Homo sapiens
  source 1..25: mol_type = genomic DNA
gaagattgagtagataggtgaattt

SEQ ID NO: 2002 - DNA, 25 bp, Homo sapiens
  source 1..25: mol_type = genomic DNA
aagattgagtagataggtgaatttg

SEQ ID NO: 2003 - DNA, 25 bp, Homo sapiens
  source 1..25: mol_type = genomic DNA
agattgagtagataggtgaatttgt

SEQ ID NO: 2004 - DNA, 25 bp, Homo sapiens
  source 1..25: mol_type = genomic DNA
gattgagtagataggtgaatttgtt

SEQ ID NO: 2005 - DNA, 25 bp, Homo sapiens
  source 1..25: mol_type = genomic DNA
attgagtagataggtgaatttgttg

SEQ ID NO: 2006 - DNA, 25 bp, Homo sapiens
  source 1..25: mol_type = genomic DNA
ttgagtagataggtgaatttgttga

SEQ ID NO: 2007 - DNA, 25 bp, Homo sapiens
  source 1..25: mol_type = genomic DNA
tgagtagataggtgaatttgttgat

SEQ ID NO: 2008 - DNA, 25 bp, Homo sapiens
  source 1..25: mol_type = genomic DNA
gagtagataggtgaatttgttgata

SEQ ID NO: 2009 - DNA, 25 bp, Homo sapiens
  source 1..25: mol_type = genomic DNA
agtagataggtgaatttgttgatag

SEQ ID NO: 2010 - DNA, 25 bp, Homo sapiens
  source 1..25: mol_type = genomic DNA
gtagataggtgaatttgttgatagt

SEQ ID NO: 2011 - DNA, 25 bp, Homo sapiens
  source 1..25: mol_type = genomic DNA
tagataggtgaatttgttgatagtc

SEQ ID NO: 2012 - DNA, 25 bp, Homo sapiens
  source 1..25: mol_type = genomic DNA
agataggtgaatttgttgatagtca

SEQ ID NO: 2013 - DNA, 25 bp, Homo sapiens
  source 1..25: mol_type = genomic DNA
gataggtgaatttgttgatagtcag

SEQ ID NO: 2014 - DNA, 25 bp, Homo sapiens
  source 1..25: mol_type = genomic DNA
ataggtgaatttgttgatagtcaga

SEQ ID NO: 2015 - DNA, 25 bp, Homo sapiens
  source 1..25: mol_type = genomic DNA
taggtgaatttgttgatagtcagat

SEQ ID NO: 2016 - DNA, 25 bp, Homo sapiens
  source 1..25: mol_type = genomic DNA
aggtgaatttgttgatagtcagatg

SEQ ID NO: 2017 - DNA, 25 bp, Homo sapiens
  source 1..25: mol_type = genomic DNA
ggtgaatttgttgatagtcagatgg

SEQ ID NO: 2018 - DNA, 25 bp, Homo sapiens
  source 1..25: mol_type = genomic DNA
gtgaatttgttgatagtcagatggg

SEQ ID NO: 2019 - DNA, 25 bp, Homo sapiens
  source 1..25: mol_type = genomic DNA
tgaatttgttgatagtcagatgggt

SEQ ID NO: 2020 - DNA, 25 bp, Homo sapiens
  source 1..25: mol_type = genomic DNA
gaatttgttgatagtcagatgggta

SEQ ID NO: 2021 - DNA, 25 bp, Homo sapiens
  source 1..25: mol_type = genomic DNA
aatttgttgatagtcagatgggtag

SEQ ID NO: 2022 - DNA, 25 bp, Homo sapiens
  source 1..25: mol_type = genomic DNA
atttgttgatagtcagatgggtaga

SEQ ID NO: 2023 - DNA, 25 bp, Homo sapiens
  source 1..25: mol_type = genomic DNA
tttgttgatagtcagatgggtagat

SEQ ID NO: 2024 - DNA, 25 bp, Homo sapiens
  source 1..25: mol_type = genomic DNA
ttgttgatagtcagatgggtagata

SEQ ID NO: 2025 - DNA, 25 bp, Homo sapiens
  source 1..25: mol_type = genomic DNA
tgttgatagtcagatgggtagatag

SEQ ID NO: 2026 - DNA, 25 bp, Homo sapiens
  source 1..25: mol_type = genomic DNA
gttgatagtcagatgggtagatagg

SEQ ID NO: 2027 - DNA, 25 bp, Homo sapiens
  source 1..25: mol_type = genomic DNA
ttgatagtcagatgggtagataggt

SEQ ID NO: 2028 - DNA, 25 bp, Homo sapiens
  source 1..25: mol_type = genomic DNA
tgatagtcagatgggtagataggta

SEQ ID NO: 2029 - DNA, 25 bp, Homo sapiens
  source 1..25: mol_type = genomic DNA
gatagtcagatgggtagataggtag

SEQ ID NO: 2030 - DNA, 25 bp, Homo sapiens
  source 1..25: mol_type = genomic DNA
atagtcagatgggtagataggtaga

SEQ ID NO: 2031 - DNA, 25 bp, Homo sapiens
  source 1..25: mol_type = genomic DNA
tagtcagatgggtagataggtagat

SEQ ID NO: 2032 - DNA, 25 bp, Homo sapiens
  source 1..25: mol_type = genomic DNA
agtcagatgggtagataggtagatg

SEQ ID NO: 2033 - DNA, 25 bp, Homo sapiens
  source 1..25: mol_type = genomic DNA
gtcagatgggtagataggtagatgg

SEQ ID NO: 2034 - DNA, 25 bp, Homo sapiens
  source 1..25: mol_type = genomic DNA
tcagatgggtagataggtagatgga

SEQ ID NO: 2035 - DNA, 25 bp, Homo sapiens
  source 1..25: mol_type = genomic DNA
cagatgggtagataggtagatggat

SEQ ID NO: 2036 - DNA, 25 bp, Homo sapiens
  source 1..25: mol_type = genomic DNA
agatgggtagataggtagatggatg

SEQ ID NO: 2037 - DNA, 25 bp, Homo sapiens
  source 1..25: mol_type = genomic DNA
gatgggtagataggtagatggatgg

SEQ ID NO: 2038 - DNA, 25 bp, Homo sapiens
  source 1..25: mol_type = genomic DNA
atgggtagataggtagatggatgga

SEQ ID NO: 2039 - DNA, 25 bp, Homo sapiens
  source 1..25: mol_type = genomic DNA
tgggtagataggtagatggatggat

SEQ ID NO: 2040 - DNA, 25 bp, Homo sapiens
  source 1..25: mol_type = genomic DNA
gggtagataggtagatggatggatg

SEQ ID NO: 2041 - DNA, 25 bp, Homo sapiens
  source 1..25: mol_type = genomic DNA
ggtagataggtagatggatggatgg

SEQ ID NO: 2042 - DNA, 25 bp, Homo sapiens
  source 1..25: mol_type = genomic DNA
gtagataggtagatggatggatgga

SEQ ID NO: 2043 - DNA, 25 bp, Homo sapiens
  source 1..25: mol_type = genomic DNA
tagataggtagatggatggatggat

SEQ ID NO: 2044 - DNA, 25 bp, Homo sapiens
  source 1..25: mol_type = genomic DNA
agataggtagatggatggatggatg

SEQ ID NO: 2045 - DNA, 25 bp, Homo sapiens
  source 1..25: mol_type = genomic DNA
gataggtagatggatggatggatgg

SEQ ID NO: 2046 - DNA, 25 bp, Homo sapiens
  source 1..25: mol_type = genomic DNA
ataggtagatggatggatggatgga

SEQ ID NO: 2047 - DNA, 25 bp, Homo sapiens
  source 1..25: mol_type = genomic DNA
taggtagatggatggatggatggat

SEQ ID NO: 2048 - DNA, 25 bp, Homo sapiens
  source 1..25: mol_type = genomic DNA
aggtagatggatggatggatggatg

SEQ ID NO: 2049 - DNA, 25 bp, Homo sapiens
  source 1..25: mol_type = genomic DNA
ggtagatggatggatggatggatgg

SEQ ID NO: 2050 - DNA, 25 bp, Homo sapiens
  source 1..25: mol_type = genomic DNA
gtagatggatggatggatggatgga

SEQ ID NO: 2051 - DNA, 25 bp, Homo sapiens
  source 1..25: mol_type = genomic DNA
tagatggatggatggatggatggat

SEQ ID NO: 2052 - DNA, 25 bp, Homo sapiens
  source 1..25: mol_type = genomic DNA
agatggatggatggatggatggatg

SEQ ID NO: 2053 - DNA, 25 bp, Homo sapiens
  source 1..25: mol_type = genomic DNA
gatggatggatggatggatggatgt

SEQ ID NO: 2054 - DNA, 25 bp, Homo sapiens
  source 1..25: mol_type = genomic DNA
atggatggatggatggatggatgta

SEQ ID NO: 2055 - DNA, 25 bp, Homo sapiens
  source 1..25: mol_type = genomic DNA
tggatggatggatggatggatgtat

SEQ ID NO: 2056 - DNA, 25 bp, Homo sapiens
  source 1..25: mol_type = genomic DNA
ggatggatggatggatggatgtata

SEQ ID NO: 2057 - DNA, 25 bp, Homo sapiens
  source 1..25: mol_type = genomic DNA
gatggatggatggatggatgtatag

SEQ ID NO: 2058 - DNA, 25 bp, Homo sapiens
  source 1..25: mol_type = genomic DNA
atggatggatggatggatgtatagg

SEQ ID NO: 2059 - DNA, 25 bp, Homo sapiens
  source 1..25: mol_type = genomic DNA
tggatggatggatggatgtataggc

SEQ ID NO: 2060 - DNA, 25 bp, Homo sapiens
  source 1..25: mol_type = genomic DNA
ggatggatggatggatgtataggca

SEQ ID NO: 2061 - DNA, 25 bp, Homo sapiens
  source 1..25: mol_type = genomic DNA
gatggatggatggatgtataggcag

SEQ ID NO: 2062 - DNA, 25 bp, Homo sapiens
  source 1..25: mol_type = genomic DNA
atggatggatggatgtataggcaga

SEQ ID NO: 2063 - DNA, 25 bp, Homo sapiens
  source 1..25: mol_type = genomic DNA
tggatggatggatgtataggcagat

SEQ ID NO: 2064 - DNA, 25 bp, Homo sapiens
  source 1..25: mol_type = genomic DNA
ggatggatggatgtataggcagatg

SEQ ID NO: 2065 - DNA, 25 bp, Homo sapiens
  source 1..25: mol_type = genomic DNA
gatggatggatgtataggcagatgg

SEQ ID NO: 2066 - DNA, 25 bp, Homo sapiens
  source 1..25: mol_type = genomic DNA
atggatggatgtataggcagatgga

SEQ ID NO: 2067 - DNA, 25 bp, Homo sapiens
  source 1..25: mol_type = genomic DNA
tggatggatgtataggcagatggac

SEQ ID NO: 2068 - DNA, 25 bp, Homo sapiens
  source 1..25: mol_type = genomic DNA
ggatggatgtataggcagatggaca

SEQ ID NO: 2069 - DNA, 25 bp, Homo sapiens
  source 1..25: mol_type = genomic DNA
gatggatgtataggcagatggacaa

SEQ ID NO: 2070 - DNA, 25 bp, Homo sapiens
  source 1..25: mol_type = genomic DNA
atggatgtataggcagatggacaaa

SEQ ID NO: 2071 - DNA, 25 bp, Homo sapiens
  source 1..25: mol_type = genomic DNA
tggatgtataggcagatggacaaat

SEQ ID NO: 2072 - DNA, 25 bp, Homo sapiens
  source 1..25: mol_type = genomic DNA
ggatgtataggcagatggacaaatg

SEQ ID NO: 2073 - DNA, 25 bp, Homo sapiens
  source 1..25: mol_type = genomic DNA
gatgtataggcagatggacaaatgg

SEQ ID NO: 2074 - DNA, 25 bp, Homo sapiens
  source 1..25: mol_type = genomic DNA
atgtataggcagatggacaaatgga

SEQ ID NO: 2075 - DNA, 25 bp, Homo sapiens
  source 1..25: mol_type = genomic DNA
tgtataggcagatggacaaatggat

SEQ ID NO: 2076 - DNA, 25 bp, Homo sapiens
  source 1..25: mol_type = genomic DNA
gtataggcagatggacaaatggatg

SEQ ID NO: 2077 - DNA, 25 bp, Homo sapiens
  source 1..25: mol_type = genomic DNA
tataggcagatggacaaatggatga

SEQ ID NO: 2078 - DNA, 25 bp, Homo sapiens
  source 1..25: mol_type = genomic DNA
ataggcagatggacaaatggatgaa

SEQ ID NO: 2079 - DNA, 25 bp, Homo sapiens
  source 1..25: mol_type = genomic DNA
taggcagatggacaaatggatgaat

SEQ ID NO: 2080 - DNA, 25 bp, Homo sapiens
  source 1..25: mol_type = genomic DNA
aggcagatggacaaatggatgaatg

SEQ ID NO: 2081 - DNA, 25 bp, Homo sapiens
  source 1..25: mol_type = genomic DNA
ggcagatggacaaatggatgaatgg

SEQ ID NO: 2082 - DNA, 25 bp, Homo sapiens
  source 1..25: mol_type = genomic DNA
gcagatggacaaatggatgaatggg

SEQ ID NO: 2083 - DNA, 25 bp, Homo sapiens
  source 1..25: mol_type = genomic DNA
cagatggacaaatggatgaatgggt

SEQ ID NO: 2084 - DNA, 25 bp, Homo sapiens
  source 1..25: mol_type = genomic DNA
agatggacaaatggatgaatgggtg

SEQ ID NO: 2085 - DNA, 25 bp, Homo sapiens
  source 1..25: mol_type = genomic DNA
gatggacaaatggatgaatgggtgg

SEQ ID NO: 2086 - DNA, 25 bp, Homo sapiens
  source 1..25: mol_type = genomic DNA
atggacaaatggatgaatgggtggg

SEQ ID NO: 2087 - DNA, 25 bp, Homo sapiens
  source 1..25: mol_type = genomic DNA
tggacaaatggatgaatgggtgggt

SEQ ID NO: 2088 - DNA, 25 bp, Homo sapiens
  source 1..25: mol_type = genomic DNA
ggacaaatggatgaatgggtgggtg

SEQ ID NO: 2089 - DNA, 25 bp, Homo sapiens
  source 1..25: mol_type = genomic DNA
gacaaatggatgaatgggtgggtgg

SEQ ID NO: 2090 - DNA, 25 bp, Homo sapiens
  source 1..25: mol_type = genomic DNA
acaaatggatgaatgggtgggtgga

SEQ ID NO: 2091 - DNA, 25 bp, Homo sapiens
  source 1..25: mol_type = genomic DNA
caaatggatgaatgggtgggtggat

SEQ ID NO: 2092 - DNA, 25 bp, Homo sapiens
  source 1..25: mol_type = genomic DNA
aaatggatgaatgggtgggtggatg

SEQ ID NO: 2093 - DNA, 25 bp, Homo sapiens
  source 1..25: mol_type = genomic DNA
aatggatgaatgggtgggtggatga

SEQ ID NO: 2094 - DNA, 25 bp, Homo sapiens
  source 1..25: mol_type = genomic DNA
atggatgaatgggtgggtggatgaa

SEQ ID NO: 2095 - DNA, 25 bp, Homo sapiens
  source 1..25: mol_type = genomic DNA
tggatgaatgggtgggtggatgaat

SEQ ID NO: 2096 - DNA, 25 bp, Homo sapiens
  source 1..25: mol_type = genomic DNA
ggatgaatgggtgggtggatgaatg

SEQ ID NO: 2097 - DNA, 25 bp, Homo sapiens
  source 1..25: mol_type = genomic DNA
gatgaatgggtgggtggatgaatgg

SEQ ID NO: 2098 - DNA, 25 bp, Homo sapiens
  source 1..25: mol_type = genomic DNA
atgaatgggtgggtggatgaatgga

SEQ ID NO: 2099 - DNA, 25 bp, Homo sapiens
  source 1..25: mol_type = genomic DNA
tgaatgggtgggtggatgaatggaa

SEQ ID NO: 2100 - DNA, 25 bp, Homo sapiens
  source 1..25: mol_type = genomic DNA
gaatgggtgggtggatgaatggaag

SEQ ID NO: 2101 - DNA, 25 bp, Homo sapiens
  source 1..25: mol_type = genomic DNA
aatgggtgggtggatgaatggaagg

SEQ ID NO: 2102 - DNA, 25 bp, Homo sapiens
  source 1..25: mol_type = genomic DNA
atgggtgggtggatgaatggaagga

SEQ ID NO: 2103 - DNA, 25 bp, Homo sapiens
  source 1..25: mol_type = genomic DNA
tgggtgggtggatgaatggaaggat

SEQ ID NO: 2104 - DNA, 25 bp, Homo sapiens
  source 1..25: mol_type = genomic DNA
gggtgggtggatgaatggaaggatg

SEQ ID NO: 2105 - DNA, 25 bp, Homo sapiens
  source 1..25: mol_type = genomic DNA
ggtgggtggatgaatggaaggatgt

SEQ ID NO: 2106 - DNA, 25 bp, Homo sapiens
  source 1..25: mol_type = genomic DNA
gtgggtggatgaatggaaggatgtg

SEQ ID NO: 2107 - DNA, 25 bp, Homo sapiens
  source 1..25: mol_type = genomic DNA
tgggtggatgaatggaaggatgtgt

SEQ ID NO: 2108 - DNA, 25 bp, Homo sapiens
  source 1..25: mol_type = genomic DNA
gggtggatgaatggaaggatgtgtg

SEQ ID NO: 2109 - DNA, 25 bp, Homo sapiens
  source 1..25: mol_type = genomic DNA
ggtggatgaatggaaggatgtgtgg

SEQ ID NO: 2110 - DNA, 25 bp, Homo sapiens
  source 1..25: mol_type = genomic DNA
gtggatgaatggaaggatgtgtggt

SEQ ID NO: 2111 - DNA, 25 bp, Homo sapiens
  source 1..25: mol_type = genomic DNA
tggatgaatggaaggatgtgtggtt

SEQ ID NO: 2112 - DNA, 25 bp, Homo sapiens
  source 1..25: mol_type = genomic DNA
ggatgaatggaaggatgtgtggttg

SEQ ID NO: 2113 - DNA, 25 bp, Homo sapiens
  source 1..25: mol_type = genomic DNA
gatgaatggaaggatgtgtggttga

SEQ ID NO: 2114 - DNA, 25 bp, Homo sapiens
  source 1..25: mol_type = genomic DNA
atgaatggaaggatgtgtggttgaa

SEQ ID NO: 2115 - DNA, 25 bp, Homo sapiens
  source 1..25: mol_type = genomic DNA
tgaatggaaggatgtgtggttgaac

SEQ ID NO: 2116 - DNA, 25 bp, Homo sapiens
  source 1..25: mol_type = genomic DNA
gaatggaaggatgtgtggttgaact

SEQ ID NO: 2117 - DNA, 25 bp, Homo sapiens
  source 1..25: mol_type = genomic DNA
aatggaaggatgtgtggttgaacta

SEQ ID NO: 2118 - DNA, 25 bp, Homo sapiens
  source 1..25: mol_type = genomic DNA
atggaaggatgtgtggttgaactat

SEQ ID NO: 2119 - DNA, 25 bp, Homo sapiens
  source 1..25: mol_type = genomic DNA
tggaaggatgtgtggttgaactatt

SEQ ID NO: 2120 - DNA, 25 bp, Homo sapiens
  source 1..25: mol_type = genomic DNA
ggaaggatgtgtggttgaactattg

SEQ ID NO: 2121 - DNA, 25 bp, Homo sapiens
  source 1..25: mol_type = genomic DNA
gaaggatgtgtggttgaactattgc

SEQ ID NO: 2122 - DNA, 25 bp, Homo sapiens
  source 1..25: mol_type = genomic DNA
aaggatgtgtggttgaactattgca

SEQ ID NO: 2123 - DNA, 25 bp, Homo sapiens
  source 1..25: mol_type = genomic DNA
aggatgtgtggttgaactattgcaa

SEQ ID NO: 2124 - DNA, 25 bp, Homo sapiens
  source 1..25: mol_type = genomic DNA
ggatgtgtggttgaactattgcaag

SEQ ID NO: 2125 - DNA, 25 bp, Homo sapiens
  source 1..25: mol_type = genomic DNA
gatgtgtggttgaactattgcaagt

SEQ ID NO: 2126 - DNA, 25 bp, Homo sapiens
  source 1..25: mol_type = genomic DNA
atgtgtggttgaactattgcaagta

SEQ ID NO: 2127 - DNA, 25 bp, Homo sapiens
  source 1..25: mol_type = genomic DNA
tgtgtggttgaactattgcaagtat

SEQ ID NO: 2128 - DNA, 25 bp, Homo sapiens
  source 1..25: mol_type = genomic DNA
gtgtggttgaactattgcaagtatt

SEQ ID NO: 2129 - DNA, 25 bp, Homo sapiens
  source 1..25: mol_type = genomic DNA
tgtggttgaactattgcaagtattg

SEQ ID NO: 2130 - DNA, 25 bp, Homo sapiens
  source 1..25: mol_type = genomic DNA
gtggttgaactattgcaagtattga

SEQ ID NO: 2131 - DNA, 25 bp, Homo sapiens
  source 1..25: mol_type = genomic DNA
tggttgaactattgcaagtattgat

SEQ ID NO: 2132 - DNA, 25 bp, Homo sapiens
  source 1..25: mol_type = genomic DNA
ggttgaactattgcaagtattgata

SEQ ID NO: 2133 - DNA, 25 bp, Homo sapiens
  source 1..25: mol_type = genomic DNA
gttgaactattgcaagtattgataa

SEQ ID NO: 2134 - DNA, 25 bp, Homo sapiens
  source 1..25: mol_type = genomic DNA
ttgaactattgcaagtattgataat

SEQ ID NO: 2135 - DNA, 25 bp, Homo sapiens
  source 1..25: mol_type = genomic DNA
tgaactattgcaagtattgataatt

SEQ ID NO: 2136 - DNA, 25 bp, Homo sapiens
  source 1..25: mol_type = genomic DNA
gaactattgcaagtattgataattg

SEQ ID NO: 2137 - DNA, 25 bp, Homo sapiens
  source 1..25: mol_type = genomic DNA
aactattgcaagtattgataattgg

SEQ ID NO: 2138 - DNA, 25 bp, Homo sapiens
  source 1..25: mol_type = genomic DNA
actattgcaagtattgataattggg

SEQ ID NO: 2139 - DNA, 25 bp, Homo sapiens
  source 1..25: mol_type = genomic DNA
ctattgcaagtattgataattgggt

SEQ ID NO: 2140 - DNA, 25 bp, Homo sapiens
  source 1..25: mol_type = genomic DNA
tattgcaagtattgataattgggtt

SEQ ID NO: 2141 - DNA, 25 bp, Homo sapiens
  source 1..25: mol_type = genomic DNA
attgcaagtattgataattgggttc

SEQ ID NO: 2142 - DNA, 25 bp, Homo sapiens
  source 1..25: mol_type = genomic DNA
ttgcaagtattgataattgggttca

SEQ ID NO: 2143 - DNA, 25 bp, Homo sapiens
  source 1..25: mol_type = genomic DNA
tgcaagtattgataattgggttcat

SEQ ID NO: 2144 - DNA, 25 bp, Homo sapiens
  source 1..25: mol_type = genomic DNA
gcaagtattgataattgggttcata

SEQ ID NO: 2145 - DNA, 25 bp, Homo sapiens
  source 1..25: mol_type = genomic DNA
caagtattgataattgggttcataa

SEQ ID NO: 2146 - DNA, 25 bp, Homo sapiens
  source 1..25: mol_type = genomic DNA
aagtattgataattgggttcataat

SEQ ID NO: 2147 - DNA, 25 bp, Homo sapiens
  source 1..25: mol_type = genomic DNA
agtattgataattgggttcataatt

SEQ ID NO: 2148 - DNA, 25 bp, Homo sapiens
  source 1..25: mol_type = genomic DNA
gtattgataattgggttcataattt

SEQ ID NO: 2149 - DNA, 25 bp, Homo sapiens
  source 1..25: mol_type = genomic DNA
tattgataattgggttcataatttc

SEQ ID NO: 2150 - DNA, 25 bp, Homo sapiens
  source 1..25: mol_type = genomic DNA
attgataattgggttcataatttct

SEQ ID NO: 2151 - DNA, 25 bp, Homo sapiens
  source 1..25: mol_type = genomic DNA
ttgataattgggttcataatttctg

SEQ ID NO: 2152 - DNA, 25 bp, Homo sapiens
  source 1..25: mol_type = genomic DNA
tgataattgggttcataatttctga

SEQ ID NO: 2153 - DNA, 25 bp, Homo sapiens
  source 1..25: mol_type = genomic DNA
gataattgggttcataatttctgaa

SEQ ID NO: 2154 - DNA, 25 bp, Homo sapiens
  source 1..25: mol_type = genomic DNA
ataattgggttcataatttctgaat

SEQ ID NO: 2155 - DNA, 25 bp, Homo sapiens
  source 1..25: mol_type = genomic DNA
taattgggttcataatttctgaata

SEQ ID NO: 2156 - DNA, 25 bp, Homo sapiens
  source 1..25: mol_type = genomic DNA
aattgggttcataatttctgaatat

SEQ ID NO: 2157 - DNA, 25 bp, Homo sapiens
  source 1..25: mol_type = genomic DNA
attgggttcataatttctgaatatt

SEQ ID NO: 2158 - DNA, 25 bp, Homo sapiens
  source 1..25: mol_type = genomic DNA
ttgggttcataatttctgaatattt

SEQ ID NO: 2159 - DNA, 25 bp, Homo sapiens
  source 1..25: mol_type = genomic DNA
tgggttcataatttctgaatattta

SEQ ID NO: 2160 - DNA, 25 bp, Homo sapiens
  source 1..25: mol_type = genomic DNA
gggttcataatttctgaatatttag

SEQ ID NO: 2161 - DNA, 25 bp, Homo sapiens
  source 1..25: mol_type = genomic DNA
ggttcataatttctgaatatttaga

SEQ ID NO: 2162 - DNA, 25 bp, Homo sapiens
  source 1..25: mol_type = genomic DNA
gttcataatttctgaatatttagat

SEQ ID NO: 2163 - DNA, 25 bp, Homo sapiens
  source 1..25: mol_type = genomic DNA
ttcataatttctgaatatttagatg

SEQ ID NO: 2164 - DNA, 25 bp, Homo sapiens
  source 1..25: mol_type = genomic DNA
tcataatttctgaatatttagatgg

SEQ ID NO: 2165 - DNA, 25 bp, Homo sapiens
  source 1..25: mol_type = genomic DNA
cataatttctgaatatttagatgga

SEQ ID NO: 2166 - DNA, 25 bp, Homo sapiens
  source 1..25: mol_type = genomic DNA
ataatttctgaatatttagatggat

SEQ ID NO: 2167 - DNA, 25 bp, Homo sapiens
  source 1..25: mol_type = genomic DNA
taatttctgaatatttagatggatg

SEQ ID NO: 2168 - DNA, 25 bp, Homo sapiens
  source 1..25: mol_type = genomic DNA
aatttctgaatatttagatggatgg

SEQ ID NO: 2169 - DNA, 25 bp, Homo sapiens
  source 1..25: mol_type = genomic DNA
atttctgaatatttagatggatggt

SEQ ID NO: 2170 - DNA, 25 bp, Homo sapiens
  source 1..25: mol_type = genomic DNA
tttctgaatatttagatggatggtt

SEQ ID NO: 2171 - DNA, 25 bp, Homo sapiens
  source 1..25: mol_type = genomic DNA
ttctgaatatttagatggatggttg

SEQ ID NO: 2172 - DNA, 25 bp, Homo sapiens
  source 1..25: mol_type = genomic DNA
tctgaatatttagatggatggttgt

SEQ ID NO: 2173 - DNA, 25 bp, Homo sapiens
  source 1..25: mol_type = genomic DNA
ctgaatatttagatggatggttgtg

SEQ ID NO: 2174 - DNA, 25 bp, Homo sapiens
  source 1..25: mol_type = genomic DNA
tgaatatttagatggatggttgtga

SEQ ID NO: 2175 - DNA, 25 bp, Homo sapiens
  source 1..25: mol_type = genomic DNA
gaatatttagatggatggttgtgag

SEQ ID NO: 2176 - DNA, 25 bp, Homo sapiens
  source 1..25: mol_type = genomic DNA
aatatttagatggatggttgtgagt

SEQ ID NO: 2177 - DNA, 25 bp, Homo sapiens
  source 1..25: mol_type = genomic DNA
atatttagatggatggttgtgagtg

SEQ ID NO: 2178 - DNA, 25 bp, Homo sapiens
  source 1..25: mol_type = genomic DNA
tatttagatggatggttgtgagtgg

SEQ ID NO: 2179 - DNA, 25 bp, Homo sapiens
  source 1..25: mol_type = genomic DNA
atttagatggatggttgtgagtggc

SEQ ID NO: 2180 - DNA, 25 bp, Homo sapiens
  source 1..25: mol_type = genomic DNA
tttagatggatggttgtgagtggct

SEQ ID NO: 2181 - DNA, 25 bp, Homo sapiens
  source 1..25: mol_type = genomic DNA
ttagatggatggttgtgagtggctg

SEQ ID NO: 2182 - DNA, 25 bp, Homo sapiens
  source 1..25: mol_type = genomic DNA
tagatggatggttgtgagtggctgg

SEQ ID NO: 2183 - DNA, 25 bp, Homo sapiens
  source 1..25: mol_type = genomic DNA
agatggatggttgtgagtggctggt

SEQ ID NO: 2184 - DNA, 25 bp, Homo sapiens
  source 1..25: mol_type = genomic DNA
gatggatggttgtgagtggctggtg

SEQ ID NO: 2185 - DNA, 25 bp, Homo sapiens
  source 1..25: mol_type = genomic DNA
atggatggttgtgagtggctggtgg

SEQ ID NO: 2186 - DNA, 25 bp, Homo sapiens
  source 1..25: mol_type = genomic DNA
tggatggttgtgagtggctggtgga

SEQ ID NO: 2187 - DNA, 25 bp, Homo sapiens
  source 1..25: mol_type = genomic DNA
ggatggttgtgagtggctggtggac

SEQ ID NO: 2188 - DNA, 25 bp, Homo sapiens
  source 1..25: mol_type = genomic DNA
gatggttgtgagtggctggtggaca

SEQ ID NO: 2189 - DNA, 25 bp, Homo sapiens
  source 1..25: mol_type = genomic DNA
atggttgtgagtggctggtggacag

SEQ ID NO: 2190 - DNA, 25 bp, Homo sapiens
  source 1..25: mol_type = genomic DNA
tggttgtgagtggctggtggacaga

SEQ ID NO: 2191 - DNA, 25 bp, Homo sapiens
  source 1..25: mol_type = genomic DNA
ggttgtgagtggctggtggacagac

SEQ ID NO: 2192 - DNA, 25 bp, Homo sapiens
  source 1..25: mol_type = genomic DNA
gttgtgagtggctggtggacagacg

SEQ ID NO: 2193 - DNA, 25 bp, Homo sapiens
  source 1..25: mol_type = genomic DNA
ttgtgagtggctggtggacagacga

SEQ ID NO: 2194 - DNA, 25 bp, Homo sapiens
  source 1..25: mol_type = genomic DNA
tgtgagtggctggtggacagacgaa

SEQ ID NO: 2195 - DNA, 25 bp, Homo sapiens
  source 1..25: mol_type = genomic DNA
gtgagtggctggtggacagacgaaa

SEQ ID NO: 2196 - DNA, 25 bp, Homo sapiens
  source 1..25: mol_type = genomic DNA
tgagtggctggtggacagacgaaaa

SEQ ID NO: 2197 - DNA, 25 bp, Homo sapiens
  source 1..25: mol_type = genomic DNA
gagtggctggtggacagacgaaaaa

SEQ ID NO: 2198 - DNA, 25 bp, Homo sapiens
  source 1..25: mol_type = genomic DNA
agtggctggtggacagacgaaaaat

SEQ ID NO: 2199 - DNA, 25 bp, Homo sapiens
  source 1..25: mol_type = genomic DNA
gtggctggtggacagacgaaaaatg

SEQ ID NO: 2200 - DNA, 25 bp, Homo sapiens
  source 1..25: mol_type = genomic DNA
tggctggtggacagacgaaaaatgg

SEQ ID NO: 2201 - DNA, 25 bp, Homo sapiens
  source 1..25: mol_type = genomic DNA
ggctggtggacagacgaaaaatgga

SEQ ID NO: 2202 - DNA, 25 bp, Homo sapiens
  source 1..25: mol_type = genomic DNA
gctggtggacagacgaaaaatggat

SEQ ID NO: 2203 - DNA, 25 bp, Homo sapiens
  source 1..25: mol_type = genomic DNA
ctggtggacagacgaaaaatggatg

SEQ ID NO: 2204 - DNA, 25 bp, Homo sapiens
  source 1..25: mol_type = genomic DNA
tggtggacagacgaaaaatggatgg

SEQ ID NO: 2205 - DNA, 25 bp, Homo sapiens
  source 1..25: mol_type = genomic DNA
ggtggacagacgaaaaatggatggt

SEQ ID NO: 2206 - DNA, 25 bp, Homo sapiens
  source 1..25: mol_type = genomic DNA
gtggacagacgaaaaatggatggtt

SEQ ID NO: 2207 - DNA, 25 bp, Homo sapiens
  source 1..25: mol_type = genomic DNA
tggacagacgaaaaatggatggttg

SEQ ID NO: 2208 - DNA, 25 bp, Homo sapiens
  source 1..25: mol_type = genomic DNA
ggacagacgaaaaatggatggttgg

SEQ ID NO: 2209 - DNA, 25 bp, Homo sapiens
  source 1..25: mol_type = genomic DNA
gacagacgaaaaatggatggttgga

SEQ ID NO: 2210 - DNA, 25 bp, Homo sapiens
  source 1..25: mol_type = genomic DNA
acagacgaaaaatggatggttggat

SEQ ID NO: 2211 - DNA, 25 bp, Homo sapiens
  source 1..25: mol_type = genomic DNA
cagacgaaaaatggatggttggata

SEQ ID NO: 2212 - DNA, 25 bp, Homo sapiens
  source 1..25: mol_type = genomic DNA
agacgaaaaatggatggttggataa

SEQ ID NO: 2213 - DNA, 25 bp, Homo sapiens
  source 1..25: mol_type = genomic DNA
gacgaaaaatggatggttggataaa

SEQ ID NO: 2214 - DNA, 25 bp, Homo sapiens
  source 1..25: mol_type = genomic DNA
acgaaaaatggatggttggataaat

SEQ ID NO: 2215 - DNA, 25 bp, Homo sapiens
  source 1..25: mol_type = genomic DNA
cgaaaaatggatggttggataaatt

SEQ ID NO: 2216 - DNA, 25 bp, Homo sapiens
  source 1..25: mol_type = genomic DNA
gaaaaatggatggttggataaattg

SEQ ID NO: 2217 - DNA, 25 bp, Homo sapiens
  source 1..25: mol_type = genomic DNA
aaaaatggatggttggataaattga

SEQ ID NO: 2218 - DNA, 25 bp, Homo sapiens
  source 1..25: mol_type = genomic DNA
aaaatggatggttggataaattgat

SEQ ID NO: 2219 - DNA, 25 bp, Homo sapiens
  source 1..25: mol_type = genomic DNA
aaatggatggttggataaattgatg

SEQ ID NO: 2220 - DNA, 25 bp, Homo sapiens
  source 1..25: mol_type = genomic DNA
aatggatggttggataaattgatgg

SEQ ID NO: 2221 - DNA, 25 bp, Homo sapiens
  source 1..25: mol_type = genomic DNA
atggatggttggataaattgatggg

SEQ ID NO: 2222 - DNA, 25 bp, Homo sapiens
  source 1..25: mol_type = genomic DNA
tggatggttggataaattgatgggt

SEQ ID NO: 2223 - DNA, 25 bp, Homo sapiens
  source 1..25: mol_type = genomic DNA
ggatggttggataaattgatgggtg

SEQ ID NO: 2224 - DNA, 25 bp, Homo sapiens
  source 1..25: mol_type = genomic DNA
gatggttggataaattgatgggtgg

SEQ ID NO: 2225 - DNA, 25 bp, Homo sapiens
  source 1..25: mol_type = genomic DNA
atggttggataaattgatgggtgga

SEQ ID NO: 2226 - DNA, 25 bp, Homo sapiens
  source 1..25: mol_type = genomic DNA
tggttggataaattgatgggtggat

SEQ ID NO: 2227 - DNA, 25 bp, Homo sapiens
  source 1..25: mol_type = genomic DNA
ggttggataaattgatgggtggatg

SEQ ID NO: 2228 - DNA, 25 bp, Homo sapiens
  source 1..25: mol_type = genomic DNA
gttggataaattgatgggtggatgg

SEQ ID NO: 2229 - DNA, 25 bp, Homo sapiens
  source 1..25: mol_type = genomic DNA
ttggataaattgatgggtggatgga

SEQ ID NO: 2230 - DNA, 25 bp, Homo sapiens
  source 1..25: mol_type = genomic DNA
tggataaattgatgggtggatggat

SEQ ID NO: 2231 - DNA, 25 bp, Homo sapiens
  source 1..25: mol_type = genomic DNA
ggataaattgatgggtggatggatg

SEQ ID NO: 2232 - DNA, 25 bp, Homo sapiens
  source 1..25: mol_type = genomic DNA
gataaattgatgggtggatggatgg

SEQ ID NO: 2233 - DNA, 25 bp, Homo sapiens
  source 1..25: mol_type = genomic DNA
ataaattgatgggtggatggatggt

SEQ ID NO: 2234 - DNA, 25 bp, Homo sapiens
  source 1..25: mol_type = genomic DNA
taaattgatgggtggatggatggtt

SEQ ID NO: 2235 - DNA, 25 bp, Homo sapiens
  source 1..25: mol_type = genomic DNA
aaattgatgggtggatggatggttg

SEQ ID NO: 2236 - DNA, 25 bp, Homo sapiens
  source 1..25: mol_type = genomic DNA
aattgatgggtggatggatggttgg

SEQ ID NO: 2237 - DNA, 25 bp, Homo sapiens
  source 1..25: mol_type = genomic DNA
attgatgggtggatggatggttggt

SEQ ID NO: 2238 - DNA, 25 bp, Homo sapiens
  source 1..25: mol_type = genomic DNA
ttgatgggtggatggatggttggtt

SEQ ID NO: 2239 - DNA, 25 bp, Homo sapiens
  source 1..25: mol_type = genomic DNA
tgatgggtggatggatggttggttg

SEQ ID NO: 2240 - DNA, 25 bp, Homo sapiens
  source 1..25: mol_type = genomic DNA
gatgggtggatggatggttggttgt

SEQ ID NO: 2241 - DNA, 25 bp, Homo sapiens
  source 1..25: mol_type = genomic DNA
atgggtggatggatggttggttgta

SEQ ID NO: 2242 - DNA, 25 bp, Homo sapiens
  source 1..25: mol_type = genomic DNA
tgggtggatggatggttggttgtat

SEQ ID NO: 2243 - DNA, 25 bp, Homo sapiens
  source 1..25: mol_type = genomic DNA
gggtggatggatggttggttgtatg

SEQ ID NO: 2244 - DNA, 25 bp, Homo sapiens
  source 1..25: mol_type = genomic DNA
ggtggatggatggttggttgtatga

SEQ ID NO: 2245 - DNA, 25 bp, Homo sapiens
  source 1..25: mol_type = genomic DNA
gtggatggatggttggttgtatgaa

SEQ ID NO: 2246 - DNA, 25 bp, Homo sapiens
  source 1..25: mol_type = genomic DNA
tggatggatggttggttgtatgaaa

SEQ ID NO: 2247 - DNA, 25 bp, Homo sapiens
  source 1..25: mol_type = genomic DNA
ggatggatggttggttgtatgaaag

SEQ ID NO: 2248 - DNA, 25 bp, Homo sapiens
  source 1..25: mol_type = genomic DNA
gatggatggttggttgtatgaaaga

SEQ ID NO: 2249 - DNA, 25 bp, Homo sapiens
  source 1..25: mol_type = genomic DNA
atggatggttggttgtatgaaagaa

SEQ ID NO: 2250 - DNA, 25 bp, Homo sapiens
  source 1..25: mol_type = genomic DNA
tggatggttggttgtatgaaagaat

SEQ ID NO: 2251 - DNA, 25 bp, Homo sapiens
  source 1..25: mol_type = genomic DNA
ggatggttggttgtatgaaagaatg

SEQ ID NO: 2252 - DNA, 25 bp, Homo sapiens
  source 1..25: mol_type = genomic DNA
gatggttggttgtatgaaagaatga

SEQ ID NO: 2253 - DNA, 25 bp, Homo sapiens
  source 1..25: mol_type = genomic DNA
atggttggttgtatgaaagaatgaa

SEQ ID NO: 2254 - DNA, 25 bp, Homo sapiens
  source 1..25: mol_type = genomic DNA
tggttggttgtatgaaagaatgaat

SEQ ID NO: 2255 - DNA, 25 bp, Homo sapiens
  source 1..25: mol_type = genomic DNA
ggttggttgtatgaaagaatgaatg

SEQ ID NO: 2256 - DNA, 25 bp, Homo sapiens
  source 1..25: mol_type = genomic DNA
gttggttgtatgaaagaatgaatga

SEQ ID NO: 2257 - DNA, 25 bp, Homo sapiens
  source 1..25: mol_type = genomic DNA
ttggttgtatgaaagaatgaatgat

SEQ ID NO: 2258 - DNA, 25 bp, Homo sapiens
  source 1..25: mol_type = genomic DNA
tggttgtatgaaagaatgaatgatt

SEQ ID NO: 2259 - DNA, 25 bp, Homo sapiens
  source 1..25: mol_type = genomic DNA
ggttgtatgaaagaatgaatgattg

SEQ ID NO: 2260 - DNA, 25 bp, Homo sapiens
  source 1..25: mol_type = genomic DNA
gttgtatgaaagaatgaatgattgg

SEQ ID NO: 2261 - DNA, 25 bp, Homo sapiens
  source 1..25: mol_type = genomic DNA
ttgtatgaaagaatgaatgattggg

SEQ ID NO: 2262 - DNA, 25 bp, Homo sapiens
  source 1..25: mol_type = genomic DNA
tgtatgaaagaatgaatgattgggt

SEQ ID NO: 2263 - DNA, 25 bp, Homo sapiens
  source 1..25: mol_type = genomic DNA
gtatgaaagaatgaatgattgggta

SEQ ID NO: 2264 - DNA, 25 bp, Homo sapiens
  source 1..25: mol_type = genomic DNA
tatgaaagaatgaatgattgggtag

SEQ ID NO: 2265 - DNA, 25 bp, Homo sapiens
  source 1..25: mol_type = genomic DNA
atgaaagaatgaatgattgggtagg

SEQ ID NO: 2266 - DNA, 25 bp, Homo sapiens
  source 1..25: mol_type = genomic DNA
tgaaagaatgaatgattgggtaggt

SEQ ID NO: 2267 - DNA, 25 bp, Homo sapiens
  source 1..25: mol_type = genomic DNA
gaaagaatgaatgattgggtaggtg

SEQ ID NO: 2268 - DNA, 25 bp, Homo sapiens
  source 1..25: mol_type = genomic DNA
aaagaatgaatgattgggtaggtgg

SEQ ID NO: 2269 - DNA, 25 bp, Homo sapiens
  source 1..25: mol_type = genomic DNA
aagaatgaatgattgggtaggtgga

SEQ ID NO: 2270 - DNA, 25 bp, Homo sapiens
  source 1..25: mol_type = genomic DNA
agaatgaatgattgggtaggtggat

SEQ ID NO: 2271 - DNA, 25 bp, Homo sapiens
  source 1..25: mol_type = genomic DNA
gaatgaatgattgggtaggtggatt

SEQ ID NO: 2272 - DNA, 25 bp, Homo sapiens
  source 1..25: mol_type = genomic DNA
aatgaatgattgggtaggtggatta

SEQ ID NO: 2273 - DNA, 25 bp, Homo sapiens
  source 1..25: mol_type = genomic DNA
atgaatgattgggtaggtggattaa

SEQ ID NO: 2274 - DNA, 25 bp, Homo sapiens
  source 1..25: mol_type = genomic DNA
tgaatgattgggtaggtggattaag

SEQ ID NO: 2275 - DNA, 25 bp, Homo sapiens
  source 1..25: mol_type = genomic DNA
gaatgattgggtaggtggattaagt

SEQ ID NO: 2276 - DNA, 25 bp, Homo sapiens
  source 1..25: mol_type = genomic DNA
aatgattgggtaggtggattaagtt

SEQ ID NO: 2277 - DNA, 25 bp, Homo sapiens
  source 1..25: mol_type = genomic DNA
atgattgggtaggtggattaagttg

SEQ ID NO: 2278 - DNA, 25 bp, Homo sapiens
  source 1..25: mol_type = genomic DNA
tgattgggtaggtggattaagttgc

SEQ ID NO: 2279 - DNA, 25 bp, Homo sapiens
  source 1..25: mol_type = genomic DNA
gattgggtaggtggattaagttgcg

SEQ ID NO: 2280 - DNA, 25 bp, Homo sapiens
  source 1..25: mol_type = genomic DNA
attgggtaggtggattaagttgcgg

SEQ ID NO: 2281 - DNA, 25 bp, Homo sapiens
  source 1..25: mol_type = genomic DNA
ttgggtaggtggattaagttgcgga

SEQ ID NO: 2282 - DNA, 25 bp, Homo sapiens
  source 1..25: mol_type = genomic DNA
tgggtaggtggattaagttgcggat

SEQ ID NO: 2283 - DNA, 25 bp, Homo sapiens
  source 1..25: mol_type = genomic DNA
gggtaggtggattaagttgcggatc

SEQ ID NO: 2284 - DNA, 25 bp, Homo sapiens
  source 1..25: mol_type = genomic DNA
ggtaggtggattaagttgcggatca

SEQ ID NO: 2285 - DNA, 25 bp, Homo sapiens
  source 1..25: mol_type = genomic DNA
gtaggtggattaagttgcggatcaa

SEQ ID NO: 2286 - DNA, 25 bp, Homo sapiens
  source 1..25: mol_type = genomic DNA
taggtggattaagttgcggatcaat

SEQ ID NO: 2287 - DNA, 25 bp, Homo sapiens
  source 1..25: mol_type = genomic DNA
aggtggattaagttgcggatcaatg

SEQ ID NO: 2288 - DNA, 25 bp, Homo sapiens
  source 1..25: mol_type = genomic DNA
ggtggattaagttgcggatcaatgt

SEQ ID NO: 2289 - DNA, 25 bp, Homo sapiens
  source 1..25: mol_type = genomic DNA
gtggattaagttgcggatcaatgta

SEQ ID NO: 2290 - DNA, 25 bp, Homo sapiens
  source 1..25: mol_type = genomic DNA
tggattaagttgcggatcaatgtat

SEQ ID NO: 2291 - DNA, 25 bp, Homo sapiens
  source 1..25: mol_type = genomic DNA
ggattaagttgcggatcaatgtatg

SEQ ID NO: 2292 - DNA, 25 bp, Homo sapiens
  source 1..25: mol_type = genomic DNA
gattaagttgcggatcaatgtatgg

SEQ ID NO: 2293 - DNA, 25 bp, Homo sapiens
  source 1..25: mol_type = genomic DNA
attaagttgcggatcaatgtatggg

SEQ ID NO: 2294 - DNA, 25 bp, Homo sapiens
  source 1..25: mol_type = genomic DNA
ttaagttgcggatcaatgtatggga

SEQ ID NO: 2295 - DNA, 25 bp, Homo sapiens
  source 1..25: mol_type = genomic DNA
taagttgcggatcaatgtatgggat

SEQ ID NO: 2296 - DNA, 25 bp, Homo sapiens
  source 1..25: mol_type = genomic DNA
aagttgcggatcaatgtatgggatg

SEQ ID NO: 2297 - DNA, 25 bp, Homo sapiens
  source 1..25: mol_type = genomic DNA
agttgcggatcaatgtatgggatgg

SEQ ID NO: 2298 - DNA, 25 bp, Homo sapiens
  source 1..25: mol_type = genomic DNA
gttgcggatcaatgtatgggatgga

SEQ ID NO: 2299 - DNA, 25 bp, Homo sapiens
  source 1..25: mol_type = genomic DNA
ttgcggatcaatgtatgggatggat

SEQ ID NO: 2300 - DNA, 25 bp, Homo sapiens
  source 1..25: mol_type = genomic DNA
tgcggatcaatgtatgggatggatg

SEQ ID NO: 2301 - DNA, 25 bp, Homo sapiens
  source 1..25: mol_type = genomic DNA
gcggatcaatgtatgggatggatga

SEQ ID NO: 2302 - DNA, 25 bp, Homo sapiens
  source 1..25: mol_type = genomic DNA
cggatcaatgtatgggatggatgaa

SEQ ID NO: 2303 - DNA, 25 bp, Homo sapiens
  source 1..25: mol_type = genomic DNA
ggatcaatgtatgggatggatgaat

SEQ ID NO: 2304 - DNA, 25 bp, Homo sapiens
  source 1..25: mol_type = genomic DNA
gatcaatgtatgggatggatgaatg

SEQ ID NO: 2305 - DNA, 25 bp, Homo sapiens
  source 1..25: mol_type = genomic DNA
atcaatgtatgggatggatgaatgg

SEQ ID NO: 2306 - DNA, 25 bp, Homo sapiens
  source 1..25: mol_type = genomic DNA
tcaatgtatgggatggatgaatgga

SEQ ID NO: 2307 - DNA, 25 bp, Homo sapiens
  source 1..25: mol_type = genomic DNA
caatgtatgggatggatgaatggat

SEQ ID NO: 2308 - DNA, 25 bp, Homo sapiens
  source 1..25: mol_type = genomic DNA
aatgtatgggatggatgaatggatg

SEQ ID NO: 2309 - DNA, 25 bp, Homo sapiens
  source 1..25: mol_type = genomic DNA
atgtatgggatggatgaatggatgg

SEQ ID NO: 2310 - DNA, 25 bp, Homo sapiens
  source 1..25: mol_type = genomic DNA
tgtatgggatggatgaatggatgga

SEQ ID NO: 2311 - DNA, 25 bp, Homo sapiens
  source 1..25: mol_type = genomic DNA
gtatgggatggatgaatggatggat

SEQ ID NO: 2312 - DNA, 25 bp, Homo sapiens
  source 1..25: mol_type = genomic DNA
tatgggatggatgaatggatggatg

SEQ ID NO: 2313 - DNA, 25 bp, Homo sapiens
  source 1..25: mol_type = genomic DNA
atgggatggatgaatggatggatgg

SEQ ID NO: 2314 - DNA, 25 bp, Homo sapiens
  source 1..25: mol_type = genomic DNA
tgggatggatgaatggatggatgga

SEQ ID NO: 2315 - DNA, 25 bp, Homo sapiens
  source 1..25: mol_type = genomic DNA
gggatggatgaatggatggatggat

SEQ ID NO: 2316 - DNA, 25 bp, Homo sapiens
  source 1..25: mol_type = genomic DNA
ggatggatgaatggatggatggatg

SEQ ID NO: 2317 - DNA, 25 bp, Homo sapiens
  source 1..25: mol_type = genomic DNA
gatggatgaatggatggatggatgg

SEQ ID NO: 2318 - DNA, 25 bp, Homo sapiens
  source 1..25: mol_type = genomic DNA
atggatgaatggatggatggatgga

SEQ ID NO: 2319 - DNA, 25 bp, Homo sapiens
  source 1..25: mol_type = genomic DNA
tggatgaatggatggatggatggat

SEQ ID NO: 2320 - DNA, 25 bp, Homo sapiens
  source 1..25: mol_type = genomic DNA
ggatgaatggatggatggatggatg

SEQ ID NO: 2321 - DNA, 25 bp, Homo sapiens
  source 1..25: mol_type = genomic DNA
gatgaatggatggatggatggatgt

SEQ ID NO: 2322 - DNA, 25 bp, Homo sapiens
  source 1..25: mol_type = genomic DNA
atgaatggatggatggatggatgtg

SEQ ID NO: 2323 - DNA, 25 bp, Homo sapiens
  source 1..25: mol_type = genomic DNA
tgaatggatggatggatggatgtgt

SEQ ID NO: 2324 - DNA, 25 bp, Homo sapiens
  source 1..25: mol_type = genomic DNA
gaatggatggatggatggatgtgtg

SEQ ID NO: 2325 - DNA, 25 bp, Homo sapiens
  source 1..25: mol_type = genomic DNA
aatggatggatggatggatgtgtgg

SEQ ID NO: 2326 - DNA, 25 bp, Homo sapiens
  source 1..25: mol_type = genomic DNA
atggatggatggatggatgtgtggt

SEQ ID NO: 2327 - DNA, 25 bp, Homo sapiens
  source 1..25: mol_type = genomic DNA
tggatggatggatggatgtgtggtt

SEQ ID NO: 2328 - DNA, 25 bp, Homo sapiens
  source 1..25: mol_type = genomic DNA
ggatggatggatggatgtgtggttg

SEQ ID NO: 2329 - DNA, 25 bp, Homo sapiens
  source 1..25: mol_type = genomic DNA
gatggatggatggatgtgtggttga

SEQ ID NO: 2330 - DNA, 25 bp, Homo sapiens
  source 1..25: mol_type = genomic DNA
atggatggatggatgtgtggttgaa

SEQ ID NO: 2331 - DNA, 25 bp, Homo sapiens
  source 1..25: mol_type = genomic DNA
tggatggatggatgtgtggttgaat

SEQ ID NO: 2332 - DNA, 25 bp, Homo sapiens
  source 1..25: mol_type = genomic DNA
ggatggatggatgtgtggttgaatt

SEQ ID NO: 2333 - DNA, 25 bp, Homo sapiens
  source 1..25: mol_type = genomic DNA
gatggatggatgtgtggttgaatta

SEQ ID NO: 2334 - DNA, 25 bp, Homo sapiens
  source 1..25: mol_type = genomic DNA
atggatggatgtgtggttgaattac

SEQ ID NO: 2335 - DNA, 25 bp, Homo sapiens
  source 1..25: mol_type = genomic DNA
tggatggatgtgtggttgaattact

SEQ ID NO: 2336 - DNA, 25 bp, Homo sapiens
  source 1..25: mol_type = genomic DNA
ggatggatgtgtggttgaattactg

SEQ ID NO: 2337 - DNA, 25 bp, Homo sapiens
  source 1..25: mol_type = genomic DNA
gatggatgtgtggttgaattactga

SEQ ID NO: 2338 - DNA, 25 bp, Homo sapiens
  source 1..25: mol_type = genomic DNA
atggatgtgtggttgaattactgaa

SEQ ID NO: 2339 - DNA, 25 bp, Homo sapiens
  source 1..25: mol_type = genomic DNA
tggatgtgtggttgaattactgaaa

SEQ ID NO: 2340 - DNA, 25 bp, Homo sapiens
  source 1..25: mol_type = genomic DNA
ggatgtgtggttgaattactgaaag

SEQ ID NO: 2341 - DNA, 25 bp, Homo sapiens
  source 1..25: mol_type = genomic DNA
gatgtgtggttgaattactgaaagg

SEQ ID NO: 2342 - DNA, 25 bp, Homo sapiens
  source 1..25: mol_type = genomic DNA
atgtgtggttgaattactgaaaggt

SEQ ID NO: 2343 - DNA, 25 bp, Homo sapiens
  source 1..25: mol_type = genomic DNA
tgtgtggttgaattactgaaaggtt

SEQ ID NO: 2344 - DNA, 25 bp, Homo sapiens
  source 1..25: mol_type = genomic DNA
gtgtggttgaattactgaaaggttg

SEQ ID NO: 2345 - DNA, 25 bp, Homo sapiens
  source 1..25: mol_type = genomic DNA
tgtggttgaattactgaaaggttgg

SEQ ID NO: 2346 - DNA, 25 bp, Homo sapiens
  source 1..25: mol_type = genomic DNA
gtggttgaattactgaaaggttgga

SEQ ID NO: 2347 - DNA, 25 bp, Homo sapiens
  source 1..25: mol_type = genomic DNA
tggttgaattactgaaaggttggaa

SEQ ID NO: 2348 - DNA, 25 bp, Homo sapiens
  source 1..25: mol_type = genomic DNA
ggttgaattactgaaaggttggaag

SEQ ID NO: 2349 - DNA, 25 bp, Homo sapiens
  source 1..25: mol_type = genomic DNA
gttgaattactgaaaggttggaaga

SEQ ID NO: 2350 - DNA, 25 bp, Homo sapiens
  source 1..25: mol_type = genomic DNA
ttgaattactgaaaggttggaagag

SEQ ID NO: 2351 - DNA, 25 bp, Homo sapiens
  source 1..25: mol_type = genomic DNA
tgaattactgaaaggttggaagagt

SEQ ID NO: 2352 - DNA, 25 bp, Homo sapiens
  source 1..25: mol_type = genomic DNA
gaattactgaaaggttggaagagtg

SEQ ID NO: 2353 - DNA, 25 bp, Homo sapiens
  source 1..25: mol_type = genomic DNA
aattactgaaaggttggaagagtgg

SEQ ID NO: 2354 - DNA, 25 bp, Homo sapiens
  source 1..25: mol_type = genomic DNA
attactgaaaggttggaagagtgga

SEQ ID NO: 2355 - DNA, 25 bp, Homo sapiens
  source 1..25: mol_type = genomic DNA
ttactgaaaggttggaagagtggat

SEQ ID NO: 2356 - DNA, 25 bp, Homo sapiens
  source 1..25: mol_type = genomic DNA
tactgaaaggttggaagagtggatg

SEQ ID NO: 2357 - DNA, 25 bp, Homo sapiens
  source 1..25: mol_type = genomic DNA
actgaaaggttggaagagtggatgg

SEQ ID NO: 2358 - DNA, 25 bp, Homo sapiens
  source 1..25: mol_type = genomic DNA
ctgaaaggttggaagagtggatggg

SEQ ID NO: 2359 - DNA, 25 bp, Homo sapiens
  source 1..25: mol_type = genomic DNA
tgaaaggttggaagagtggatgggt

SEQ ID NO: 2360 - DNA, 25 bp, Homo sapiens
  source 1..25: mol_type = genomic DNA
gaaaggttggaagagtggatgggtg

SEQ ID NO: 2361 - DNA, 25 bp, Homo sapiens
  source 1..25: mol_type = genomic DNA
aaaggttggaagagtggatgggtga

SEQ ID NO: 2362 - DNA, 25 bp, Homo sapiens
  source 1..25: mol_type = genomic DNA
aaggttggaagagtggatgggtgaa

SEQ ID NO: 2363 - DNA, 25 bp, Homo sapiens
  source 1..25: mol_type = genomic DNA
aggttggaagagtggatgggtgaaa

SEQ ID NO: 2364 - DNA, 25 bp, Homo sapiens
  source 1..25: mol_type = genomic DNA
ggttggaagagtggatgggtgaaat

SEQ ID NO: 2365 - DNA, 25 bp, Homo sapiens
  source 1..25: mol_type = genomic DNA
gttggaagagtggatgggtgaaatt

SEQ ID NO: 2366 - DNA, 25 bp, Homo sapiens
  source 1..25: mol_type = genomic DNA
ttggaagagtggatgggtgaaattt

SEQ ID NO: 2367 - DNA, 25 bp, Homo sapiens
  source 1..25: mol_type = genomic DNA
tggaagagtggatgggtgaaatttg

SEQ ID NO: 2368 - DNA, 25 bp, Homo sapiens
  source 1..25: mol_type = genomic DNA
ggaagagtggatgggtgaaatttgg

SEQ ID NO: 2369 - DNA, 25 bp, Homo sapiens
  source 1..25: mol_type = genomic DNA
gaagagtggatgggtgaaatttggg

SEQ ID NO: 2370 - DNA, 25 bp, Homo sapiens
  source 1..25: mol_type = genomic DNA
aagagtggatgggtgaaatttgggg

SEQ ID NO: 2371 - DNA, 25 bp, Homo sapiens
  source 1..25: mol_type = genomic DNA
agagtggatgggtgaaatttggggt

SEQ ID NO: 2372 - DNA, 25 bp, Homo sapiens
  source 1..25: mol_type = genomic DNA
gagtggatgggtgaaatttggggta

SEQ ID NO: 2373 - DNA, 25 bp, Homo sapiens
  source 1..25: mol_type = genomic DNA
agtggatgggtgaaatttggggtag

SEQ ID NO: 2374 - DNA, 25 bp, Homo sapiens
  source 1..25: mol_type = genomic DNA
gtggatgggtgaaatttggggtagt

SEQ ID NO: 2375 - DNA, 25 bp, Homo sapiens
  source 1..25: mol_type = genomic DNA
tggatgggtgaaatttggggtagtt

SEQ ID NO: 2376 - DNA, 25 bp, Homo sapiens
  source 1..25: mol_type = genomic DNA
ggatgggtgaaatttggggtagtta

SEQ ID NO: 2377 - DNA, 25 bp, Homo sapiens
  source 1..25: mol_type = genomic DNA
gatgggtgaaatttggggtagttag

SEQ ID NO: 2378 - DNA, 25 bp, Homo sapiens
  source 1..25: mol_type = genomic DNA
atgggtgaaatttggggtagttaga

SEQ ID NO: 2379 - DNA, 25 bp, Homo sapiens
  source 1..25: mol_type = genomic DNA
tgggtgaaatttggggtagttagat

SEQ ID NO: 2380 - DNA, 25 bp, Homo sapiens
  source 1..25: mol_type = genomic DNA
gggtgaaatttggggtagttagatg

SEQ ID NO: 2381 - DNA, 25 bp, Homo sapiens
  source 1..25: mol_type = genomic DNA
ggtgaaatttggggtagttagatgg

SEQ ID NO: 2382 - DNA, 25 bp, Homo sapiens
  source 1..25: mol_type = genomic DNA
gtgaaatttggggtagttagatggg

SEQ ID NO: 2383 - DNA, 25 bp, Homo sapiens
  source 1..25: mol_type = genomic DNA
tgaaatttggggtagttagatgggt

SEQ ID NO: 2384 - DNA, 25 bp, Homo sapiens
  source 1..25: mol_type = genomic DNA
gaaatttggggtagttagatgggtg

SEQ ID NO: 2385 - DNA, 25 bp, Homo sapiens
  source 1..25: mol_type = genomic DNA
aaatttggggtagttagatgggtgg

SEQ ID NO: 2386 - DNA, 25 bp, Homo sapiens
  source 1..25: mol_type = genomic DNA
aatttggggtagttagatgggtggg

SEQ ID NO: 2387 - DNA, 25 bp, Homo sapiens
  source 1..25: mol_type = genomic DNA
atttggggtagttagatgggtgggt

SEQ ID NO: 2388 - DNA, 25 bp, Homo sapiens
  source 1..25: mol_type = genomic DNA
tttggggtagttagatgggtgggtg

SEQ ID NO: 2389 - DNA, 25 bp, Homo sapiens
  source 1..25: mol_type = genomic DNA
ttggggtagttagatgggtgggtgt

SEQ ID NO: 2390 - DNA, 25 bp, Homo sapiens
  source 1..25: mol_type = genomic DNA
tggggtagttagatgggtgggtgtg

SEQ ID NO: 2391 - DNA, 25 bp, Homo sapiens
  source 1..25: mol_type = genomic DNA
ggggtagttagatgggtgggtgtgt

SEQ ID NO: 2392 - DNA, 25 bp, Homo sapiens
  source 1..25: mol_type = genomic DNA
gggtagttagatgggtgggtgtgtg

SEQ ID NO: 2393 - DNA, 25 bp, Homo sapiens
  source 1..25: mol_type = genomic DNA
ggtagttagatgggtgggtgtgtgg

SEQ ID NO: 2394 - DNA, 25 bp, Homo sapiens
  source 1..25: mol_type = genomic DNA
gtagttagatgggtgggtgtgtgga

SEQ ID NO: 2395 - DNA, 25 bp, Homo sapiens
  source 1..25: mol_type = genomic DNA
tagttagatgggtgggtgtgtggat

SEQ ID NO: 2396 - DNA, 25 bp, Homo sapiens
  source 1..25: mol_type = genomic DNA
agttagatgggtgggtgtgtggatg

SEQ ID NO: 2397 - DNA, 25 bp, Homo sapiens
  source 1..25: mol_type = genomic DNA
gttagatgggtgggtgtgtggatgg

SEQ ID NO: 2398 - DNA, 25 bp, Homo sapiens
  source 1..25: mol_type = genomic DNA
ttagatgggtgggtgtgtggatgga

SEQ ID NO: 2399 - DNA, 25 bp, Homo sapiens
  source 1..25: mol_type = genomic DNA
tagatgggtgggtgtgtggatggat

SEQ ID NO: 2400 - DNA, 25 bp, Homo sapiens
  source 1..25: mol_type = genomic DNA
agatgggtgggtgtgtggatggata

SEQ ID NO: 2401 - DNA, 25 bp, Homo sapiens
  source 1..25: mol_type = genomic DNA
gatgggtgggtgtgtggatggataa

SEQ ID NO: 2402 - DNA, 25 bp, Homo sapiens
  source 1..25: mol_type = genomic DNA
atgggtgggtgtgtggatggataaa

SEQ ID NO: 2403 - DNA, 25 bp, Homo sapiens
  source 1..25: mol_type = genomic DNA
tgggtgggtgtgtggatggataaaa

SEQ ID NO: 2404 - DNA, 25 bp, Homo sapiens
  source 1..25: mol_type = genomic DNA
gggtgggtgtgtggatggataaaag

SEQ ID NO: 2405 - DNA, 25 bp, Homo sapiens
  source 1..25: mol_type = genomic DNA
ggtgggtgtgtggatggataaaaga

SEQ ID NO: 2406 - DNA, 25 bp, Homo sapiens
  source 1..25: mol_type = genomic DNA
gtgggtgtgtggatggataaaagag

SEQ ID NO: 2407 - DNA, 25 bp, Homo sapiens
  source 1..25: mol_type = genomic DNA
tgggtgtgtggatggataaaagagt

SEQ ID NO: 2408 - DNA, 25 bp, Homo sapiens
  source 1..25: mol_type = genomic DNA
gggtgtgtggatggataaaagagta

SEQ ID NO: 2409 - DNA, 25 bp, Homo sapiens
  source 1..25: mol_type = genomic DNA
ggtgtgtggatggataaaagagtag

SEQ ID NO: 2410 - DNA, 25 bp, Homo sapiens
  source 1..25: mol_type = genomic DNA
gtgtgtggatggataaaagagtaga

SEQ ID NO: 2411 - DNA, 25 bp, Homo sapiens
  source 1..25: mol_type = genomic DNA
tgtgtggatggataaaagagtagat

SEQ ID NO: 2412 - DNA, 25 bp, Homo sapiens
  source 1..25: mol_type = genomic DNA
gtgtggatggataaaagagtagatg

SEQ ID NO: 2413 - DNA, 25 bp, Homo sapiens
  source 1..25: mol_type = genomic DNA
tgtggatggataaaagagtagatga

SEQ ID NO: 2414 - DNA, 25 bp, Homo sapiens
  source 1..25: mol_type = genomic DNA
gtggatggataaaagagtagatgaa

SEQ ID NO: 2415 - DNA, 25 bp, Homo sapiens
  source 1..25: mol_type = genomic DNA
tggatggataaaagagtagatgaat

SEQ ID NO: 2416 - DNA, 25 bp, Homo sapiens
  source 1..25: mol_type = genomic DNA
ggatggataaaagagtagatgaatg

SEQ ID NO: 2417 - DNA, 25 bp, Homo sapiens
  source 1..25: mol_type = genomic DNA
gatggataaaagagtagatgaatga

SEQ ID NO: 2418 - DNA, 25 bp, Homo sapiens
  source 1..25: mol_type = genomic DNA
atggataaaagagtagatgaatgaa

SEQ ID NO: 2419 - DNA, 25 bp, Homo sapiens
  source 1..25: mol_type = genomic DNA
tggataaaagagtagatgaatgaat

SEQ ID NO: 2420 - DNA, 25 bp, Homo sapiens
  source 1..25: mol_type = genomic DNA
ggataaaagagtagatgaatgaatt

SEQ ID NO: 2421 - DNA, 25 bp, Homo sapiens
  source 1..25: mol_type = genomic DNA
gataaaagagtagatgaatgaatta

SEQ ID NO: 2422 - DNA, 25 bp, Homo sapiens
  source 1..25: mol_type = genomic DNA
ataaaagagtagatgaatgaattaa

SEQ ID NO: 2423 - DNA, 25 bp, Homo sapiens
  source 1..25: mol_type = genomic DNA
taaaagagtagatgaatgaattaat

SEQ ID NO: 2424 - DNA, 25 bp, Homo sapiens
  source 1..25: mol_type = genomic DNA
aaaagagtagatgaatgaattaatg

SEQ ID NO: 2425 - DNA, 25 bp, Homo sapiens
  source 1..25: mol_type = genomic DNA
aaagagtagatgaatgaattaatga

SEQ ID NO: 2426 - DNA, 25 bp, Homo sapiens
  source 1..25: mol_type = genomic DNA
aagagtagatgaatgaattaatgaa

SEQ ID NO: 2427 - DNA, 25 bp, Homo sapiens
  source 1..25: mol_type = genomic DNA
agagtagatgaatgaattaatgaat

SEQ ID NO: 2428 - DNA, 25 bp, Homo sapiens
  source 1..25: mol_type = genomic DNA
gagtagatgaatgaattaatgaata

SEQ ID NO: 2429 - DNA, 25 bp, Homo sapiens
  source 1..25: mol_type = genomic DNA
agtagatgaatgaattaatgaataa

SEQ ID NO: 2430 - DNA, 25 bp, Homo sapiens
  source 1..25: mol_type = genomic DNA
gtagatgaatgaattaatgaataaa

SEQ ID NO: 2431 - DNA, 25 bp, Homo sapiens
  source 1..25: mol_type = genomic DNA
tagatgaatgaattaatgaataaac

SEQ ID NO: 2432 - DNA, 25 bp, Homo sapiens
  source 1..25: mol_type = genomic DNA
agatgaatgaattaatgaataaaca

SEQ ID NO: 2433 - DNA, 25 bp, Homo sapiens
  source 1..25: mol_type = genomic DNA
gatgaatgaattaatgaataaacag

SEQ ID NO: 2434 - DNA, 25 bp, Homo sapiens
  source 1..25: mol_type = genomic DNA
atgaatgaattaatgaataaacagg

SEQ ID NO: 2435 - DNA, 25 bp, Homo sapiens
  source 1..25: mol_type = genomic DNA
tgaatgaattaatgaataaacaggc

SEQ ID NO: 2436 - DNA, 25 bp, Homo sapiens
  source 1..25: mol_type = genomic DNA
gaatgaattaatgaataaacaggca

SEQ ID NO: 2437 - DNA, 25 bp, Homo sapiens
  source 1..25: mol_type = genomic DNA
aatgaattaatgaataaacaggcag

SEQ ID NO: 2438 - DNA, 25 bp, Homo sapiens
  source 1..25: mol_type = genomic DNA
atgaattaatgaataaacaggcaga

SEQ ID NO: 2439 - DNA, 25 bp, Homo sapiens
  source 1..25: mol_type = genomic DNA
tgaattaatgaataaacaggcagat

SEQ ID NO: 2440 - DNA, 25 bp, Homo sapiens
  source 1..25: mol_type = genomic DNA
gaattaatgaataaacaggcagatg

SEQ ID NO: 2441 - DNA, 25 bp, Homo sapiens
  source 1..25: mol_type = genomic DNA
aattaatgaataaacaggcagatgg

SEQ ID NO: 2442 - DNA, 25 bp, Homo sapiens
  source 1..25: mol_type = genomic DNA
attaatgaataaacaggcagatgga

SEQ ID NO: 2443 - DNA, 25 bp, Homo sapiens
  source 1..25: mol_type = genomic DNA
ttaatgaataaacaggcagatggat

SEQ ID NO: 2444 - DNA, 25 bp, Homo sapiens
  source 1..25: mol_type = genomic DNA
taatgaataaacaggcagatggatg

SEQ ID NO: 2445 - DNA, 25 bp, Homo sapiens
  source 1..25: mol_type = genomic DNA
aatgaataaacaggcagatggatga

SEQ ID NO: 2446 - DNA, 25 bp, Homo sapiens
  source 1..25: mol_type = genomic DNA
atgaataaacaggcagatggatgat

SEQ ID NO: 2447 - DNA, 25 bp, Homo sapiens
  source 1..25: mol_type = genomic DNA
tgaataaacaggcagatggatgatg

SEQ ID NO: 2448 - DNA, 25 bp, Homo sapiens
  source 1..25: mol_type = genomic DNA
gaataaacaggcagatggatgatgt

SEQ ID NO: 2449 - DNA, 25 bp, Homo sapiens
  source 1..25: mol_type = genomic DNA
aataaacaggcagatggatgatgta

SEQ ID NO: 2450 - DNA, 25 bp, Homo sapiens
  source 1..25: mol_type = genomic DNA
ataaacaggcagatggatgatgtaa

SEQ ID NO: 2451 - DNA, 25 bp, Homo sapiens
  source 1..25: mol_type = genomic DNA
taaacaggcagatggatgatgtaag

SEQ ID NO: 2452 - DNA, 25 bp, Homo sapiens
  source 1..25: mol_type = genomic DNA
aaacaggcagatggatgatgtaagc

SEQ ID NO: 2453 - DNA, 25 bp, Homo sapiens
  source 1..25: mol_type = genomic DNA
aacaggcagatggatgatgtaagct

SEQ ID NO: 2454 - DNA, 25 bp, Homo sapiens
  source 1..25: mol_type = genomic DNA
acaggcagatggatgatgtaagctg

SEQ ID NO: 2455 - DNA, 25 bp, Homo sapiens
  source 1..25: mol_type = genomic DNA
caggcagatggatgatgtaagctgc

SEQ ID NO: 2456 - DNA, 25 bp, Homo sapiens
  source 1..25: mol_type = genomic DNA
aggcagatggatgatgtaagctgcc

SEQ ID NO: 2457 - DNA, 25 bp, Homo sapiens
  source 1..25: mol_type = genomic DNA
ggcagatggatgatgtaagctgccc

SEQ ID NO: 2458 - DNA, 25 bp, Homo sapiens
  source 1..25: mol_type = genomic DNA
gcagatggatgatgtaagctgcccc

SEQ ID NO: 2459 - DNA, 25 bp, Homo sapiens
  source 1..25: mol_type = genomic DNA
cagatggatgatgtaagctgcccca

SEQ ID NO: 2460 - DNA, 25 bp, Homo sapiens
  source 1..25: mol_type = genomic DNA
agatggatgatgtaagctgccccag

SEQ ID NO: 2461 - DNA, 25 bp, Homo sapiens
  source 1..25: mol_type = genomic DNA
gatggatgatgtaagctgccccaga

SEQ ID NO: 2462 - DNA, 25 bp, Homo sapiens
  source 1..25: mol_type = genomic DNA
atggatgatgtaagctgccccagac

SEQ ID NO: 2463 - DNA, 25 bp, Homo sapiens
  source 1..25: mol_type = genomic DNA
tggatgatgtaagctgccccagacc

SEQ ID NO: 2464 - DNA, 25 bp, Homo sapiens
  source 1..25: mol_type = genomic DNA
ggatgatgtaagctgccccagaccc

SEQ ID NO: 2465 - DNA, 25 bp, Homo sapiens
  source 1..25: mol_type = genomic DNA
gatgatgtaagctgccccagaccct

SEQ ID NO: 2466 - DNA, 25 bp, Homo sapiens
  source 1..25: mol_type = genomic DNA
atgatgtaagctgccccagaccctg

SEQ ID NO: 2467 - DNA, 25 bp, Homo sapiens
  source 1..25: mol_type = genomic DNA
tgatgtaagctgccccagaccctgg

SEQ ID NO: 2468 - DNA, 25 bp, Homo sapiens
  source 1..25: mol_type = genomic DNA
gatgtaagctgccccagaccctggg

SEQ ID NO: 2469 - DNA, 25 bp, Homo sapiens
  source 1..25: mol_type = genomic DNA
atgtaagctgccccagaccctggga

SEQ ID NO: 2470 - DNA, 25 bp, Homo sapiens
  source 1..25: mol_type = genomic DNA
tgtaagctgccccagaccctgggac

SEQ ID NO: 2471 - DNA, 25 bp, Homo sapiens
  source 1..25: mol_type = genomic DNA
gtaagctgccccagaccctgggacc

SEQ ID NO: 2472 - DNA, 25 bp, Homo sapiens
  source 1..25: mol_type = genomic DNA
taagctgccccagaccctgggacct

SEQ ID NO: 2473 - DNA, 25 bp, Homo sapiens
  source 1..25: mol_type = genomic DNA
aagctgccccagaccctgggacctc

SEQ ID NO: 2474 - DNA, 25 bp, Homo sapiens
  source 1..25: mol_type = genomic DNA
agctgccccagaccctgggacctct

SEQ ID NO: 2475 - DNA, 25 bp, Homo sapiens
  source 1..25: mol_type = genomic DNA
gctgccccagaccctgggacctctg

SEQ ID NO: 2476 - DNA, 25 bp, Homo sapiens
  source 1..25: mol_type = genomic DNA
ctgccccagaccctgggacctctga

SEQ ID NO: 2477 - DNA, 25 bp, Homo sapiens
  source 1..25: mol_type = genomic DNA
tgccccagaccctgggacctctgac

SEQ ID NO: 2478 - DNA, 25 bp, Homo sapiens
  source 1..25: mol_type = genomic DNA
gccccagaccctgggacctctgacc

SEQ ID NO: 2479 - DNA, 25 bp, Homo sapiens
  source 1..25: mol_type = genomic DNA
ccccagaccctgggacctctgaccc

SEQ ID NO: 2480 - DNA, 25 bp, Homo sapiens
  source 1..25: mol_type = genomic DNA
cccagaccctgggacctctgacccc

SEQ ID NO: 2481 - DNA, 25 bp, Homo sapiens
  source 1..25: mol_type = genomic DNA
ccagaccctgggacctctgaccccc

SEQ ID NO: 2482 - DNA, 25 bp, Homo sapiens
  source 1..25: mol_type = genomic DNA
cagaccctgggacctctgacccccg

SEQ ID NO: 2483 - DNA, 25 bp, Homo sapiens
  source 1..25: mol_type = genomic DNA
agaccctgggacctctgacccccgg

SEQ ID NO: 2484 - DNA, 25 bp, Homo sapiens
  source 1..25: mol_type = genomic DNA
gaccctgggacctctgacccccggc

SEQ ID NO: 2485 - DNA, 25 bp, Homo sapiens
  source 1..25: mol_type = genomic DNA
accctgggacctctgacccccggcg

SEQ ID NO: 2486 - DNA, 25 bp, Homo sapiens
  source 1..25: mol_type = genomic DNA
ccctgggacctctgacccccggcga

SEQ ID NO: 2487 - DNA, 25 bp, Homo sapiens
  source 1..25: mol_type = genomic DNA
cctgggacctctgacccccggcgac

SEQ ID NO: 2488 - DNA, 25 bp, Homo sapiens
  source 1..25: mol_type = genomic DNA
ctgggacctctgacccccggcgacc

SEQ ID NO: 2489 - DNA, 25 bp, Homo sapiens
  source 1..25: mol_type = genomic DNA
tgggacctctgacccccggcgaccc

SEQ ID NO: 2490 - DNA, 25 bp, Homo sapiens
  source 1..25: mol_type = genomic DNA
gggacctctgacccccggcgacccc

SEQ ID NO: 2491 - DNA, 25 bp, Homo sapiens
  source 1..25: mol_type = genomic DNA
ggacctctgacccccggcgacccct

SEQ ID NO: 2492 - DNA, 25 bp, Homo sapiens
  source 1..25: mol_type = genomic DNA
gacctctgacccccggcgacccctt

SEQ ID NO: 2493 - DNA, 25 bp, Homo sapiens
  source 1..25: mol_type = genomic DNA
acctctgacccccggcgaccccttg

SEQ ID NO: 2494 - DNA, 25 bp, Homo sapiens
  source 1..25: mol_type = genomic DNA
cctctgacccccggcgaccccttgc

SEQ ID NO: 2495 - DNA, 25 bp, Homo sapiens
  source 1..25: mol_type = genomic DNA
ctctgacccccggcgaccccttgca

SEQ ID NO: 2496 - DNA, 25 bp, Homo sapiens
  source 1..25: mol_type = genomic DNA
tctgacccccggcgaccccttgcac

SEQ ID NO: 2497 - DNA, 25 bp, Homo sapiens
  source 1..25: mol_type = genomic DNA
ctgacccccggcgaccccttgcact

SEQ ID NO: 2498 - DNA, 25 bp, Homo sapiens
  source 1..25: mol_type = genomic DNA
tgacccccggcgaccccttgcactc

SEQ ID NO: 2499 - DNA, 25 bp, Homo sapiens
  source 1..25: mol_type = genomic DNA
gacccccggcgaccccttgcactct

SEQ ID NO: 2500 - DNA, 25 bp, Homo sapiens
  source 1..25: mol_type = genomic DNA
acccccggcgaccccttgcactctc

SEQ ID NO: 2501 - DNA, 25 bp, Homo sapiens
  source 1..25: mol_type = genomic DNA
cccccggcgaccccttgcactctcc

SEQ ID NO: 2502 - DNA, 25 bp, Homo sapiens
  source 1..25: mol_type = genomic DNA
ccccggcgaccccttgcactctcca

SEQ ID NO: 2503 - DNA, 25 bp, Homo sapiens
  source 1..25: mol_type = genomic DNA
cccggcgaccccttgcactctccat

SEQ ID NO: 2504 - DNA, 25 bp, Homo sapiens
  source 1..25: mol_type = genomic DNA
ccggcgaccccttgcactctccatg

SEQ ID NO: 2505 - DNA, 25 bp, Homo sapiens
  source 1..25: mol_type = genomic DNA
cggcgaccccttgcactctccatga

SEQ ID NO: 2506 - DNA, 25 bp, Homo sapiens
  source 1..25: mol_type = genomic DNA
ggcgaccccttgcactctccatgac

SEQ ID NO: 2507 - DNA, 25 bp, Homo sapiens
  source 1..25: mol_type = genomic DNA
gcgaccccttgcactctccatgaca

SEQ ID NO: 2508 - DNA, 25 bp, Homo sapiens
  source 1..25: mol_type = genomic DNA
cgaccccttgcactctccatgacac

SEQ ID NO: 2509 - DNA, 25 bp, Homo sapiens
  source 1..25: mol_type = genomic DNA
gaccccttgcactctccatgacact

SEQ ID NO: 2510 - DNA, 25 bp, Homo sapiens
  source 1..25: mol_type = genomic DNA
accccttgcactctccatgacactt

SEQ ID NO: 2511 - DNA, 25 bp, Homo sapiens
  source 1..25: mol_type = genomic DNA
ccccttgcactctccatgacacttt

SEQ ID NO: 2512 - DNA, 25 bp, Homo sapiens
  source 1..25: mol_type = genomic DNA
cccttgcactctccatgacactttc

SEQ ID NO: 2513 - DNA, 25 bp, Homo sapiens
  source 1..25: mol_type = genomic DNA
ccttgcactctccatgacactttct

SEQ ID NO: 2514 - DNA, 25 bp, Homo sapiens
  source 1..25: mol_type = genomic DNA
cttgcactctccatgacactttctc

SEQ ID NO: 2515 - DNA, 25 bp, Homo sapiens
  source 1..25: mol_type = genomic DNA
ttgcactctccatgacactttctct

SEQ ID NO: 2516 - DNA, 25 bp, Homo sapiens
  source 1..25: mol_type = genomic DNA
tgcactctccatgacactttctctc

SEQ ID NO: 2517 - DNA, 25 bp, Homo sapiens
  source 1..25: mol_type = genomic DNA
gcactctccatgacactttctctcc

SEQ ID NO: 2518 - DNA, 25 bp, Homo sapiens
  source 1..25: mol_type = genomic DNA
cactctccatgacactttctctccc

SEQ ID NO: 2519 - DNA, 25 bp, Homo sapiens
  source 1..25: mol_type = genomic DNA
actctccatgacactttctctccca

SEQ ID NO: 2520 - DNA, 25 bp, Homo sapiens
  source 1..25: mol_type = genomic DNA
ctctccatgacactttctctcccat

SEQ ID NO: 2521 - DNA, 25 bp, Homo sapiens
  source 1..25: mol_type = genomic DNA
tctccatgacactttctctcccatg

SEQ ID NO: 2522 - DNA, 25 bp, Homo sapiens
  source 1..25: mol_type = genomic DNA
ctccatgacactttctctcccatgg

SEQ ID NO: 2523 - DNA, 25 bp, Homo sapiens
  source 1..25: mol_type = genomic DNA
tccatgacactttctctcccatggt

SEQ ID NO: 2524 - DNA, 25 bp, Homo sapiens
  source 1..25: mol_type = genomic DNA
ccatgacactttctctcccatggtg

SEQ ID NO: 2525 - DNA, 25 bp, Homo sapiens
  source 1..25: mol_type = genomic DNA
catgacactttctctcccatggtgg

SEQ ID NO: 2526 - DNA, 25 bp, Homo sapiens
  source 1..25: mol_type = genomic DNA
atgacactttctctcccatggtggc

SEQ ID NO: 2527 - DNA, 25 bp, Homo sapiens
  source 1..25: mol_type = genomic DNA
tgacactttctctcccatggtggca

SEQ ID NO: 2528 - DNA, 25 bp, Homo sapiens
  source 1..25: mol_type = genomic DNA
gacactttctctcccatggtggcag

SEQ ID NO: 2529 - DNA, 23 bp, synthetic construct
  source 1..23: mol_type = other DNA
ggaggggccgagcaatgaccctc

SEQ ID NO: 2530 - DNA, 23 bp, synthetic construct
  source 1..23: mol_type = other DNA
gggaggggccgagcaatgaccct

SEQ ID NO: 2531 - DNA, 23 bp, synthetic construct
  source 1..23: mol_type = other DNA
tgggaggggccgagcaatgaccc

SEQ ID NO: 2532 - DNA, 23 bp, synthetic construct
  source 1..23: mol_type = other DNA
atgggaggggccgagcaatgacc

SEQ ID NO: 2533 - DNA, 23 bp, synthetic construct
  source 1..23: mol_type = other DNA
catgggaggggccgagcaatgac

SEQ ID NO: 2534 - DNA, 23 bp, synthetic construct
  source 1..23: mol_type = other DNA
gcatgggaggggccgagcaatga

SEQ ID NO: 2535 - DNA, 23 bp, synthetic construct
  source 1..23: mol_type = other DNA
ggcatgggaggggccgagcaatg

SEQ ID NO: 2536 - DNA, 23 bp, synthetic construct
  source 1..23: mol_type = other DNA
tggcatgggaggggccgagcaat

SEQ ID NO: 2537 - DNA, 23 bp, synthetic construct
  source 1..23: mol_type = other DNA
gtggcatgggaggggccgagcaa

SEQ ID NO: 2538 - DNA, 23 bp, synthetic construct
  source 1..23: mol_type = other DNA
agtggcatgggaggggccgagca

SEQ ID NO: 2539 - DNA, 23 bp, synthetic construct
  source 1..23: mol_type = other DNA
aagtggcatgggaggggccgagc

SEQ ID NO: 2540 - DNA, 23 bp, synthetic construct
  source 1..23: mol_type = other DNA
gaagtggcatgggaggggccgag

SEQ ID NO: 2541 - DNA, 23 bp, synthetic construct
  source 1..23: mol_type = other DNA
ggaagtggcatgggaggggccga

SEQ ID NO: 2542 - DNA, 23 bp, synthetic construct
  source 1..23: mol_type = other DNA
tggaagtggcatgggaggggccg

SEQ ID NO: 2543 - DNA, 23 bp, synthetic construct
  source 1..23: mol_type = other DNA
gtggaagtggcatgggaggggcc

SEQ ID NO: 2544 - DNA, 23 bp, synthetic construct
  source 1..23: mol_type = other DNA
agtggaagtggcatgggaggggc

SEQ ID NO: 2545 - DNA, 23 bp, synthetic construct
  source 1..23: mol_type = other DNA
gagtggaagtggcatgggagggg

SEQ ID NO: 2546 - DNA, 23 bp, synthetic construct
  source 1..23: mol_type = other DNA
tgagtggaagtggcatgggaggg

SEQ ID NO: 2547 - DNA, 23 bp, synthetic construct
  source 1..23: mol_type = other DNA
gtgagtggaagtggcatgggagg

SEQ ID NO: 2548 - DNA, 23 bp, synthetic construct
  source 1..23: mol_type = other DNA
ggtgagtggaagtggcatgggag

SEQ ID NO: 2549 - DNA, 23 bp, synthetic construct
  source 1..23: mol_type = other DNA
tggtgagtggaagtggcatggga

SEQ ID NO: 2550 - DNA, 23 bp, synthetic construct
  source 1..23: mol_type = other DNA
atggtgagtggaagtggcatggg

SEQ ID NO: 2551 - DNA, 23 bp, synthetic construct
  source 1..23: mol_type = other DNA
aatggtgagtggaagtggcatgg

SEQ ID NO: 2552 - DNA, 23 bp, synthetic construct
  source 1..23: mol_type = other DNA
gaatggtgagtggaagtggcatg

SEQ ID NO: 2553 - DNA, 23 bp, synthetic construct
  source 1..23: mol_type = other DNA
ggaatggtgagtggaagtggcat

SEQ ID NO: 2554 - DNA, 23 bp, synthetic construct
  source 1..23: mol_type = other DNA
aggaatggtgagtggaagtggca

SEQ ID NO: 2555 - DNA, 23 bp, synthetic construct
  source 1..23: mol_type = other DNA
caggaatggtgagtggaagtggc

SEQ ID NO: 2556 - DNA, 23 bp, synthetic construct
  source 1..23: mol_type = other DNA
gcaggaatggtgagtggaagtgg

SEQ ID NO: 2557 - DNA, 23 bp, synthetic construct
  source 1..23: mol_type = other DNA
ggcaggaatggtgagtggaagtg

SEQ ID NO: 2558 - DNA, 23 bp, synthetic construct
  source 1..23: mol_type = other DNA
aggcaggaatggtgagtggaagt

SEQ ID NO: 2559 - DNA, 23 bp, synthetic construct
  source 1..23: mol_type = other DNA
caggcaggaatggtgagtggaag

SEQ ID NO: 2560 - DNA, 23 bp, synthetic construct
  source 1..23: mol_type = other DNA
gcaggcaggaatggtgagtggaa

SEQ ID NO: 2561 - DNA, 23 bp, synthetic construct
  source 1..23: mol_type = other DNA
ggcaggcaggaatggtgagtgga

SEQ ID NO: 2562 - DNA, 23 bp, synthetic construct
  source 1..23: mol_type = other DNA
gggcaggcaggaatggtgagtgg

SEQ ID NO: 2563 - DNA, 23 bp, synthetic construct
  source 1..23: mol_type = other DNA
tgggcaggcaggaatggtgagtg

SEQ ID NO: 2564 - DNA, 23 bp, synthetic construct
  source 1..23: mol_type = other DNA
ctgggcaggcaggaatggtgagt

SEQ ID NO: 2565 - DNA, 23 bp, synthetic construct
  source 1..23: mol_type = other DNA
gctgggcaggcaggaatggtgag

SEQ ID NO: 2566 - DNA, 23 bp, synthetic construct
  source 1..23: mol_type = other DNA
agctgggcaggcaggaatggtga

SEQ ID NO: 2567 - DNA, 23 bp, synthetic construct
  source 1..23: mol_type = other DNA
gagctgggcaggcaggaatggtg

SEQ ID NO: 2568 - DNA, 23 bp, synthetic construct
  source 1..23: mol_type = other DNA
agagctgggcaggcaggaatggt

SEQ ID NO: 2569 - DNA, 23 bp, synthetic construct
  source 1..23: mol_type = other DNA
aagagctgggcaggcaggaatgg

SEQ ID NO: 2570 - DNA, 23 bp, synthetic construct
  source 1..23: mol_type = other DNA
gaagagctgggcaggcaggaatg

SEQ ID NO: 2571 - DNA, 23 bp, synthetic construct
  source 1..23: mol_type = other DNA
ggaagagctgggcaggcaggaat

SEQ ID NO: 2572 - DNA, 23 bp, synthetic construct
  source 1..23: mol_type = other DNA
aggaagagctgggcaggcaggaa

SEQ ID NO: 2573 - DNA, 23 bp, synthetic construct
  source 1..23: mol_type = other DNA
gaggaagagctgggcaggcagga

SEQ ID NO: 2574 - DNA, 23 bp, synthetic construct
  source 1..23: mol_type = other DNA
agaggaagagctgggcaggcagg

SEQ ID NO: 2575 - DNA, 23 bp, synthetic construct
  source 1..23: mol_type = other DNA
aagaggaagagctgggcaggcag

SEQ ID NO: 2576 - DNA, 23 bp, synthetic construct
  source 1..23: mol_type = other DNA
aaagaggaagagctgggcaggca

SEQ ID NO: 2577 - DNA, 23 bp, synthetic construct
  source 1..23: mol_type = other DNA
gaaagaggaagagctgggcaggc

SEQ ID NO: 2578 - DNA, 23 bp, synthetic construct
  source 1..23: mol_type = other DNA
agaaagaggaagagctgggcagg

SEQ ID NO: 2579 - DNA, 23 bp, synthetic construct
  source 1..23: mol_type = other DNA
cagaaagaggaagagctgggcag

SEQ ID NO: 2580 - DNA, 23 bp, synthetic construct
  source 1..23: mol_type = other DNA
ccagaaagaggaagagctgggca

SEQ ID NO: 2581 - DNA, 23 bp, synthetic construct
  source 1..23: mol_type = other DNA
gccagaaagaggaagagctgggc

SEQ ID NO: 2582 - DNA, 23 bp, synthetic construct
  source 1..23: mol_type = other DNA
ggccagaaagaggaagagctggg

SEQ ID NO: 2583 - DNA, 23 bp, synthetic construct
  source 1..23: mol_type = other DNA
tggccagaaagaggaagagctgg

SEQ ID NO: 2584 - DNA, 23 bp, synthetic construct
  source 1..23: mol_type = other DNA
gtggccagaaagaggaagagctg

SEQ ID NO: 2585 - DNA, 23 bp, synthetic construct
  source 1..23: mol_type = other DNA
tgtggccagaaagaggaagagct

SEQ ID NO: 2586 - DNA, 23 bp, synthetic construct
  source 1..23: mol_type = other DNA
gtgtggccagaaagaggaagagc

SEQ ID NO: 2587 - DNA, 23 bp, synthetic construct
  source 1..23: mol_type = other DNA
ggtgtggccagaaagaggaagag

SEQ ID NO: 2588 - DNA, 23 bp, synthetic construct
  source 1..23: mol_type = other DNA
tggtgtggccagaaagaggaaga

SEQ ID NO: 2589 - DNA, 23 bp, synthetic construct
  source 1..23: mol_type = other DNA
atggtgtggccagaaagaggaag

SEQ ID NO: 2590 - DNA, 23 bp, synthetic construct
  source 1..23: mol_type = other DNA
gatggtgtggccagaaagaggaa

SEQ ID NO: 2591 - DNA, 23 bp, synthetic construct
  source 1..23: mol_type = other DNA
ggatggtgtggccagaaagagga

SEQ ID NO: 2592 - DNA, 23 bp, synthetic construct
  source 1..23: mol_type = other DNA
tggatggtgtggccagaaagagg

SEQ ID NO: 2593 - DNA, 23 bp, synthetic construct
  source 1..23: mol_type = other DNA
gtggatggtgtggccagaaagag

SEQ ID NO: 2594 - DNA, 23 bp, synthetic construct
  source 1..23: mol_type = other DNA
tgtggatggtgtggccagaaaga

SEQ ID NO: 2595 - DNA, 23 bp, synthetic construct
  source 1..23: mol_type = other DNA
gtgtggatggtgtggccagaaag

SEQ ID NO: 2596 - DNA, 23 bp, synthetic construct
  source 1..23: mol_type = other DNA
agtgtggatggtgtggccagaaa

SEQ ID NO: 2597 - DNA, 23 bp, synthetic construct
  source 1..23: mol_type = other DNA
gagtgtggatggtgtggccagaa

SEQ ID NO: 2598 - DNA, 23 bp, synthetic construct
  source 1..23: mol_type = other DNA
agagtgtggatggtgtggccaga

SEQ ID NO: 2599 - DNA, 23 bp, synthetic construct
  source 1..23: mol_type = other DNA
gagagtgtggatggtgtggccag

SEQ ID NO: 2600 - DNA, 23 bp, synthetic construct
  source 1..23: mol_type = other DNA
ggagagtgtggatggtgtggcca

SEQ ID NO: 2601 - DNA, 23 bp, synthetic construct
  source 1..23: mol_type = other DNA
aggagagtgtggatggtgtggcc

SEQ ID NO: 2602 - DNA, 23 bp, synthetic construct
  source 1..23: mol_type = other DNA
caggagagtgtggatggtgtggc

SEQ ID NO: 2603 - DNA, 23 bp, synthetic construct
  source 1..23: mol_type = other DNA
ccaggagagtgtggatggtgtgg

SEQ ID NO: 2604 - DNA, 23 bp, synthetic construct
  source 1..23: mol_type = other DNA
gccaggagagtgtggatggtgtg

SEQ ID NO: 2605 - DNA, 23 bp, synthetic construct
  source 1..23: mol_type = other DNA
ggccaggagagtgtggatggtgt

SEQ ID NO: 2606 - DNA, 23 bp, synthetic construct
  source 1..23: mol_type = other DNA
gggccaggagagtgtggatggtg

SEQ ID NO: 2607 - DNA, 23 bp, synthetic construct
  source 1..23: mol_type = other DNA
agggccaggagagtgtggatggt

SEQ ID NO: 2608 - DNA, 23 bp, synthetic construct
  source 1..23: mol_type = other DNA
gagggccaggagagtgtggatgg

SEQ ID NO: 2609 - DNA, 23 bp, synthetic construct
  source 1..23: mol_type = other DNA
agagggccaggagagtgtggatg

SEQ ID NO: 2610 - DNA, 23 bp, synthetic construct
  source 1..23: mol_type = other DNA
cagagggccaggagagtgtggat

SEQ ID NO: 2611 - DNA, 23 bp, synthetic construct
  source 1..23: mol_type = other DNA
tcagagggccaggagagtgtgga

SEQ ID NO: 2612 - DNA, 23 bp, synthetic construct
  source 1..23: mol_type = other DNA
ctcagagggccaggagagtgtgg

SEQ ID NO: 2613 - DNA, 23 bp, synthetic construct
  source 1..23: mol_type = other DNA
tctcagagggccaggagagtgtg

SEQ ID NO: 2614 - DNA, 23 bp, synthetic construct
  source 1..23: mol_type = other DNA
gtctcagagggccaggagagtgt

SEQ ID NO: 2615 - DNA, 23 bp, synthetic construct
  source 1..23: mol_type = other DNA
agtctcagagggccaggagagtg

SEQ ID NO: 2616 - DNA, 23 bp, synthetic construct
  source 1..23: mol_type = other DNA
cagtctcagagggccaggagagt

SEQ ID NO: 2617 - DNA, 23 bp, synthetic construct
  source 1..23: mol_type = other DNA
gcagtctcagagggccaggagag

SEQ ID NO: 2618 - DNA, 23 bp, synthetic construct
  source 1..23: mol_type = other DNA
ggcagtctcagagggccaggaga

SEQ ID NO: 2619 - DNA, 23 bp, synthetic construct
  source 1..23: mol_type = other DNA
gggcagtctcagagggccaggag

SEQ ID NO: 2620 - DNA, 23 bp, synthetic construct
  source 1..23: mol_type = other DNA
cgggcagtctcagagggccagga

SEQ ID NO: 2621 - DNA, 23 bp, synthetic construct
  source 1..23: mol_type = other DNA
gcgggcagtctcagagggccagg

SEQ ID NO: 2622 - DNA, 23 bp, synthetic construct
  source 1..23: mol_type = other DNA
ggcgggcagtctcagagggccag

SEQ ID NO: 2623 - DNA, 23 bp, synthetic construct
  source 1..23: mol_type = other DNA
tggcgggcagtctcagagggcca

SEQ ID NO: 2624 - DNA, 23 bp, synthetic construct
  source 1..23: mol_type = other DNA
atggcgggcagtctcagagggcc

SEQ ID NO: 2625 - DNA, 23 bp, synthetic construct
  source 1..23: mol_type = other DNA
catggcgggcagtctcagagggc

SEQ ID NO: 2626 - DNA, 23 bp, synthetic construct
  source 1..23: mol_type = other DNA
gcatggcgggcagtctcagaggg

SEQ ID NO: 2627 - DNA, 23 bp, synthetic construct
  source 1..23: mol_type = other DNA
ggcatggcgggcagtctcagagg

SEQ ID NO: 2628 - DNA, 23 bp, synthetic construct
  source 1..23: mol_type = other DNA
tggcatggcgggcagtctcagag

SEQ ID NO: 2629 - DNA, 23 bp, synthetic construct
  source 1..23: mol_type = other DNA
atggcatggcgggcagtctcaga

SEQ ID NO: 2630 - DNA, 23 bp, synthetic construct
  source 1..23: mol_type = other DNA
aatggcatggcgggcagtctcag

SEQ ID NO: 2631 - DNA, 23 bp, synthetic construct
  source 1..23: mol_type = other DNA
gaatggcatggcgggcagtctca

SEQ ID NO: 2632 - DNA, 23 bp, synthetic construct
  source 1..23: mol_type = other DNA
ggaatggcatggcgggcagtctc

SEQ ID NO: 2633 - DNA, 23 bp, synthetic construct
  source 1..23: mol_type = other DNA
gggaatggcatggcgggcagtct

SEQ ID NO: 2634 - DNA, 23 bp, synthetic construct
  source 1..23: mol_type = other DNA
agggaatggcatggcgggcagtc

SEQ ID NO: 2635 - DNA, 23 bp, synthetic construct
  source 1..23: mol_type = other DNA
aagggaatggcatggcgggcagt

SEQ ID NO: 2636 - DNA, 23 bp, synthetic construct
  source 1..23: mol_type = other DNA
aaagggaatggcatggcgggcag

SEQ ID NO: 2637 - DNA, 23 bp, synthetic construct
  source 1..23: mol_type = other DNA
taaagggaatggcatggcgggca

SEQ ID NO: 2638 - DNA, 23 bp, synthetic construct
  source 1..23: mol_type = other DNA
gtaaagggaatggcatggcgggc

SEQ ID NO: 2639 - DNA, 23 bp, synthetic construct
  source 1..23: mol_type = other DNA
ggtaaagggaatggcatggcggg

SEQ ID NO: 2640 - DNA, 23 bp, synthetic construct
  source 1..23: mol_type = other DNA
aggtaaagggaatggcatggcgg

SEQ ID NO: 2641 - DNA, 23 bp, synthetic construct
  source 1..23: mol_type = other DNA
caggtaaagggaatggcatggcg

SEQ ID NO: 2642 - DNA, 23 bp, synthetic construct
  source 1..23: mol_type = other DNA
ccaggtaaagggaatggcatggc

SEQ ID NO: 2643 - DNA, 23 bp, synthetic construct
  source 1..23: mol_type = other DNA
tccaggtaaagggaatggcatgg

SEQ ID NO: 2644 - DNA, 23 bp, synthetic construct
  source 1..23: mol_type = other DNA
ttccaggtaaagggaatggcatg

SEQ ID NO: 2645 - DNA, 23 bp, synthetic construct
  source 1..23: mol_type = other DNA
tttccaggtaaagggaatggcat

SEQ ID NO: 2646 - DNA, 23 bp, synthetic construct
  source 1..23: mol_type = other DNA
ttttccaggtaaagggaatggca

SEQ ID NO: 2647 - DNA, 23 bp, synthetic construct
  source 1..23: mol_type = other DNA
gttttccaggtaaagggaatggc

SEQ ID NO: 2648 - DNA, 23 bp, synthetic construct
  source 1..23: mol_type = other DNA
agttttccaggtaaagggaatgg

SEQ ID NO: 2649 - DNA, 23 bp, synthetic construct
  source 1..23: mol_type = other DNA
gagttttccaggtaaagggaatg

SEQ ID NO: 2650 - DNA, 23 bp, synthetic construct
  source 1..23: mol_type = other DNA
ggagttttccaggtaaagggaat

SEQ ID NO: 2651 - DNA, 23 bp, synthetic construct
  source 1..23: mol_type = other DNA
aggagttttccaggtaaagggaa

SEQ ID NO: 2652 - DNA, 23 bp, synthetic construct
  source 1..23: mol_type = other DNA
gaggagttttccaggtaaaggga

SEQ ID NO: 2653 - DNA, 23 bp, synthetic construct
  source 1..23: mol_type = other DNA
ggaggagttttccaggtaaaggg

SEQ ID NO: 2654 - DNA, 23 bp, synthetic construct
  source 1..23: mol_type = other DNA
gggaggagttttccaggtaaagg

SEQ ID NO: 2655 - DNA, 23 bp, synthetic construct
  source 1..23: mol_type = other DNA
agggaggagttttccaggtaaag

SEQ ID NO: 2656 - DNA, 23 bp, synthetic construct
  source 1..23: mol_type = other DNA
tagggaggagttttccaggtaaa

SEQ ID NO: 2657 - DNA, 23 bp, synthetic construct
  source 1..23: mol_type = other DNA
atagggaggagttttccaggtaa

SEQ ID NO: 2658 - DNA, 23 bp, synthetic construct
  source 1..23: mol_type = other DNA
gatagggaggagttttccaggta

SEQ ID NO: 2659 - DNA, 23 bp, synthetic construct
  source 1..23: mol_type = other DNA
ggatagggaggagttttccaggt

SEQ ID NO: 2660 - DNA, 23 bp, synthetic construct
  source 1..23: mol_type = other DNA
tggatagggaggagttttccagg

SEQ ID NO: 2661 - DNA, 23 bp, synthetic construct
  source 1..23: mol_type = other DNA
atggatagggaggagttttccag

SEQ ID NO: 2662 - DNA, 23 bp, synthetic construct
  source 1..23: mol_type = other DNA
gatggatagggaggagttttcca

SEQ ID NO: 2663 - DNA, 23 bp, synthetic construct
  source 1..23: mol_type = other DNA
tgatggatagggaggagttttcc

SEQ ID NO: 2664 - DNA, 23 bp, synthetic construct
  source 1..23: mol_type = other DNA
ttgatggatagggaggagttttc

SEQ ID NO: 2665 - DNA, 23 bp, synthetic construct
  source 1..23: mol_type = other DNA
tttgatggatagggaggagtttt

SEQ ID NO: 2666 - DNA, 23 bp, synthetic construct
  source 1..23: mol_type = other DNA
ctttgatggatagggaggagttt

SEQ ID NO: 2667 - DNA, 23 bp, synthetic construct
  source 1..23: mol_type = other DNA
actttgatggatagggaggagtt

SEQ ID NO: 2668 - DNA, 23 bp, synthetic construct
  source 1..23: mol_type = other DNA
gactttgatggatagggaggagt

SEQ ID NO: 2669 - DNA, 23 bp, synthetic construct
  source 1..23: mol_type = other DNA
ggactttgatggatagggaggag

SEQ ID NO: 2670 - DNA, 23 bp, synthetic construct
  source 1..23: mol_type = other DNA
tggactttgatggatagggagga

SEQ ID NO: 2671 - DNA, 23 bp, synthetic construct
  source 1..23: mol_type = other DNA
ctggactttgatggatagggagg

SEQ ID NO: 2672 - DNA, 23 bp, synthetic construct
  source 1..23: mol_type = other DNA
tctggactttgatggatagggag

SEQ ID NO: 2673 - DNA, 23 bp, synthetic construct
  source 1..23: mol_type = other DNA
atctggactttgatggataggga

SEQ ID NO: 2674 - DNA, 23 bp, synthetic construct
  source 1..23: mol_type = other DNA
aatctggactttgatggataggg

SEQ ID NO: 2675 - DNA, 23 bp, synthetic construct
  source 1..23: mol_type = other DNA
gaatctggactttgatggatagg

SEQ ID NO: 2676 - DNA, 23 bp, synthetic construct
  source 1..23: mol_type = other DNA
tgaatctggactttgatggatag

SEQ ID NO: 2677 - DNA, 23 bp, synthetic construct
  source 1..23: mol_type = other DNA
ctgaatctggactttgatggata

SEQ ID NO: 2678 - DNA, 23 bp, synthetic construct
  source 1..23: mol_type = other DNA
cctgaatctggactttgatggat

SEQ ID NO: 2679 - DNA, 23 bp, synthetic construct
  source 1..23: mol_type = other DNA
ccctgaatctggactttgatgga

SEQ ID NO: 2680 - DNA, 23 bp, synthetic construct
  source 1..23: mol_type = other DNA
accctgaatctggactttgatgg

SEQ ID NO: 2681 - DNA, 23 bp, synthetic construct
  source 1..23: mol_type = other DNA
gaccctgaatctggactttgatg

SEQ ID NO: 2682 - DNA, 23 bp, synthetic construct
  source 1..23: mol_type = other DNA
tgaccctgaatctggactttgat

SEQ ID NO: 2683 - DNA, 23 bp, synthetic construct
  source 1..23: mol_type = other DNA
gtgaccctgaatctggactttga

SEQ ID NO: 2684 - DNA, 23 bp, synthetic construct
  source 1..23: mol_type = other DNA
ggtgaccctgaatctggactttg

SEQ ID NO: 2685 - DNA, 23 bp, synthetic construct
  source 1..23: mol_type = other DNA
aggtgaccctgaatctggacttt

SEQ ID NO: 2686 - DNA, 23 bp, synthetic construct
  source 1..23: mol_type = other DNA
gaggtgaccctgaatctggactt

SEQ ID NO: 2687 - DNA, 23 bp, synthetic construct
  source 1..23: mol_type = other DNA
ggaggtgaccctgaatctggact

SEQ ID NO: 2688 - DNA, 23 bp, synthetic construct
  source 1..23: mol_type = other DNA
aggaggtgaccctgaatctggac

SEQ ID NO: 2689 - DNA, 23 bp, synthetic construct
  source 1..23: mol_type = other DNA
gaggaggtgaccctgaatctgga

SEQ ID NO: 2690 - DNA, 23 bp, synthetic construct
  source 1..23: mol_type = other DNA
agaggaggtgaccctgaatctgg

SEQ ID NO: 2691 - DNA, 23 bp, synthetic construct
  source 1..23: mol_type = other DNA
cagaggaggtgaccctgaatctg

SEQ ID NO: 2692 - DNA, 23 bp, synthetic construct
  source 1..23: mol_type = other DNA
ccagaggaggtgaccctgaatct

SEQ ID NO: 2693 - DNA, 23 bp, synthetic construct
  source 1..23: mol_type = other DNA
cccagaggaggtgaccctgaatc

SEQ ID NO: 2694 - DNA, 23 bp, synthetic construct
  source 1..23: mol_type = other DNA
tcccagaggaggtgaccctgaat

SEQ ID NO: 2695 - DNA, 23 bp, synthetic construct
  source 1..23: mol_type = other DNA
ttcccagaggaggtgaccctgaa

SEQ ID NO: 2696 - DNA, 23 bp, synthetic construct
  source 1..23: mol_type = other DNA
cttcccagaggaggtgaccctga

SEQ ID NO: 2697 - DNA, 23 bp, synthetic construct
  source 1..23: mol_type = other DNA
gcttcccagaggaggtgaccctg

SEQ ID NO: 2698 - DNA, 23 bp, synthetic construct
  source 1..23: mol_type = other DNA
ggcttcccagaggaggtgaccct

SEQ ID NO: 2699 - DNA, 23 bp, synthetic construct
  source 1..23: mol_type = other DNA
gggcttcccagaggaggtgaccc

SEQ ID NO: 2700 - DNA, 23 bp, synthetic construct
  source 1..23: mol_type = other DNA
tgggcttcccagaggaggtgacc

SEQ ID NO: 2701 - DNA, 23 bp, synthetic construct
  source 1..23: mol_type = other DNA
gtgggcttcccagaggaggtgac

SEQ ID NO: 2702 - DNA, 23 bp, synthetic construct
  source 1..23: mol_type = other DNA
ggtgggcttcccagaggaggtga

SEQ ID NO: 2703 - DNA, 23 bp, synthetic construct
  source 1..23: mol_type = other DNA
aggtgggcttcccagaggaggtg

SEQ ID NO: 2704 - DNA, 23 bp, synthetic construct
  source 1..23: mol_type = other DNA
aaggtgggcttcccagaggaggt

SEQ ID NO: 2705 - DNA, 23 bp, synthetic construct
  source 1..23: mol_type = other DNA
caaggtgggcttcccagaggagg

SEQ ID NO: 2706 - DNA, 23 bp, synthetic construct
  source 1..23: mol_type = other DNA
ccaaggtgggcttcccagaggag

SEQ ID NO: 2707 - DNA, 23 bp, synthetic construct
  source 1..23: mol_type = other DNA
gccaaggtgggcttcccagagga

SEQ ID NO: 2708 - DNA, 23 bp, synthetic construct
  source 1..23: mol_type = other DNA
ggccaaggtgggcttcccagagg

SEQ ID NO: 2709 - DNA, 23 bp, synthetic construct
  source 1..23: mol_type = other DNA
aggccaaggtgggcttcccagag

SEQ ID NO: 2710 - DNA, 23 bp, synthetic construct
  source 1..23: mol_type = other DNA
gaggccaaggtgggcttcccaga

SEQ ID NO: 2711 - DNA, 23 bp, synthetic construct
  source 1..23: mol_type = other DNA
ggaggccaaggtgggcttcccag

SEQ ID NO: 2712 - DNA, 23 bp, synthetic construct
  source 1..23: mol_type = other DNA
tggaggccaaggtgggcttccca

SEQ ID NO: 2713 - DNA, 23 bp, synthetic construct
  source 1..23: mol_type = other DNA
ctggaggccaaggtgggcttccc

SEQ ID NO: 2714 - DNA, 23 bp, synthetic construct
  source 1..23: mol_type = other DNA
cctggaggccaaggtgggcttcc

SEQ ID NO: 2715 - DNA, 23 bp, synthetic construct
  source 1..23: mol_type = other DNA
acctggaggccaaggtgggcttc

SEQ ID NO: 2716 - DNA, 23 bp, synthetic construct
  source 1..23: mol_type = other DNA
aacctggaggccaaggtgggctt

SEQ ID NO: 2717 - DNA, 23 bp, synthetic construct
  source 1..23: mol_type = other DNA
caacctggaggccaaggtgggct

SEQ ID NO: 2718 - DNA, 23 bp, synthetic construct
  source 1..23: mol_type = other DNA
tcaacctggaggccaaggtgggc

SEQ ID NO: 2719 - DNA, 23 bp, synthetic construct
  source 1..23: mol_type = other DNA
gtcaacctggaggccaaggtggg

SEQ ID NO: 2720 - DNA, 23 bp, synthetic construct
  source 1..23: mol_type = other DNA
agtcaacctggaggccaaggtgg

SEQ ID NO: 2721 - DNA, 23 bp, synthetic construct
  source 1..23: mol_type = other DNA
gagtcaacctggaggccaaggtg

SEQ ID NO: 2722 - DNA, 23 bp, synthetic construct
  source 1..23: mol_type = other DNA
agagtcaacctggaggccaaggt

SEQ ID NO: 2723 - DNA, 23 bp, synthetic construct
  source 1..23: mol_type = other DNA
gagagtcaacctggaggccaagg

SEQ ID NO: 2724 - DNA, 23 bp, synthetic construct
  source 1..23: mol_type = other DNA
tgagagtcaacctggaggccaag

SEQ ID NO: 2725 - DNA, 23 bp, synthetic construct
  source 1..23: mol_type = other DNA
gtgagagtcaacctggaggccaa

SEQ ID NO: 2726 - DNA, 23 bp, synthetic construct
  source 1..23: mol_type = other DNA
agtgagagtcaacctggaggcca

SEQ ID NO: 2727 - DNA, 23 bp, synthetic construct
  source 1..23: mol_type = other DNA
tagtgagagtcaacctggaggcc

SEQ ID NO: 2728 - DNA, 23 bp, synthetic construct
  source 1..23: mol_type = other DNA
gtagtgagagtcaacctggaggc

SEQ ID NO: 2729 - DNA, 23 bp, synthetic construct
  source 1..23: mol_type = other DNA
agtagtgagagtcaacctggagg

SEQ ID NO: 2730 - DNA, 23 bp, synthetic construct
  source 1..23: mol_type = other DNA
gagtagtgagagtcaacctggag

SEQ ID NO: 2731 - DNA, 23 bp, synthetic construct
  source 1..23: mol_type = other DNA
tgagtagtgagagtcaacctgga

SEQ ID NO: 2732 - DNA, 23 bp, synthetic construct
  source 1..23: mol_type = other DNA
atgagtagtgagagtcaacctgg

SEQ ID NO: 2733 - DNA, 23 bp, synthetic construct
  source 1..23: mol_type = other DNA
gatgagtagtgagagtcaacctg

SEQ ID NO: 2734 - DNA, 23 bp, synthetic construct
  source 1..23: mol_type = other DNA
tgatgagtagtgagagtcaacct

SEQ ID NO: 2735 - DNA, 23 bp, synthetic construct
  source 1..23: mol_type = other DNA
atgatgagtagtgagagtcaacc

SEQ ID NO: 2736 - DNA, 23 bp, synthetic construct
  source 1..23: mol_type = other DNA
gatgatgagtagtgagagtcaac

SEQ ID NO: 2737 - DNA, 23 bp, synthetic construct
  source 1..23: mol_type = other DNA
tgatgatgagtagtgagagtcaa

SEQ ID NO: 2738 - DNA, 23 bp, synthetic construct
  source 1..23: mol_type = other DNA
ctgatgatgagtagtgagagtca

SEQ ID NO: 2739 - DNA, 23 bp, synthetic construct
  source 1..23: mol_type = other DNA
cctgatgatgagtagtgagagtc

SEQ ID NO: 2740 - DNA, 23 bp, synthetic construct
  source 1..23: mol_type = other DNA
acctgatgatgagtagtgagagt

SEQ ID NO: 2741 - DNA, 23 bp, synthetic construct
  source 1..23: mol_type = other DNA
aacctgatgatgagtagtgagag

SEQ ID NO: 2742 - DNA, 23 bp, synthetic construct
  source 1..23: mol_type = other DNA
gaacctgatgatgagtagtgaga

SEQ ID NO: 2743 - DNA, 23 bp, synthetic construct
  source 1..23: mol_type = other DNA
agaacctgatgatgagtagtgag

SEQ ID NO: 2744 - DNA, 23 bp, synthetic construct
  source 1..23: mol_type = other DNA
aagaacctgatgatgagtagtga

SEQ ID NO: 2745 - DNA, 23 bp, synthetic construct
  source 1..23: mol_type = other DNA
gaagaacctgatgatgagtagtg

SEQ ID NO: 2746 - DNA, 23 bp, synthetic construct
  source 1..23: mol_type = other DNA
ggaagaacctgatgatgagtagt

SEQ ID NO: 2747 - DNA, 23 bp, synthetic construct
  source 1..23: mol_type = other DNA
aggaagaacctgatgatgagtag

SEQ ID NO: 2748 - DNA, 23 bp, synthetic construct
  source 1..23: mol_type = other DNA
aaggaagaacctgatgatgagta

SEQ ID NO: 2749 - DNA, 23 bp, synthetic construct
  source 1..23: mol_type = other DNA
gaaggaagaacctgatgatgagt

SEQ ID NO: 2750 - DNA, 23 bp, synthetic construct
  source 1..23: mol_type = other DNA
agaaggaagaacctgatgatgag

SEQ ID NO: 2751 - DNA, 23 bp, synthetic construct
  source 1..23: mol_type = other DNA
tagaaggaagaacctgatgatga

SEQ ID NO: 2752 - DNA, 23 bp, synthetic construct
  source 1..23: mol_type = other DNA
atagaaggaagaacctgatgatg

SEQ ID NO: 2753 - DNA, 23 bp, synthetic construct
  source 1..23: mol_type = other DNA
aatagaaggaagaacctgatgat

SEQ ID NO: 2754 - DNA, 23 bp, synthetic construct
  source 1..23: mol_type = other DNA
gaatagaaggaagaacctgatga

SEQ ID NO: 2755 - DNA, 23 bp, synthetic construct
  source 1..23: mol_type = other DNA
ggaatagaaggaagaacctgatg

SEQ ID NO: 2756 - DNA, 23 bp, synthetic construct
  source 1..23: mol_type = other DNA
tggaatagaaggaagaacctgat

SEQ ID NO: 2757 - DNA, 23 bp, synthetic construct
  source 1..23: mol_type = other DNA
ctggaatagaaggaagaacctga

SEQ ID NO: 2758 - DNA, 23 bp, synthetic construct
  source 1..23: mol_type = other DNA
gctggaatagaaggaagaacctg

SEQ ID NO: 2759 - DNA, 23 bp, synthetic construct
  source 1..23: mol_type = other DNA
ggctggaatagaaggaagaacct

SEQ ID NO: 2760 - DNA, 23 bp, synthetic construct
  source 1..23: mol_type = other DNA
gggctggaatagaaggaagaacc

SEQ ID NO: 2761 - DNA, 23 bp, synthetic construct
  source 1..23: mol_type = other DNA
agggctggaatagaaggaagaac

SEQ ID NO: 2762 - DNA, 23 bp, synthetic construct
  source 1..23: mol_type = other DNA
tagggctggaatagaaggaagaa

SEQ ID NO: 2763 - DNA, 23 bp, synthetic construct
  source 1..23: mol_type = other DNA
ttagggctggaatagaaggaaga

SEQ ID NO: 2764 - DNA, 23 bp, synthetic construct
  source 1..23: mol_type = other DNA
gttagggctggaatagaaggaag

SEQ ID NO: 2765 - DNA, 23 bp, synthetic construct
  source 1..23: mol_type = other DNA
ggttagggctggaatagaaggaa

SEQ ID NO: 2766 - DNA, 23 bp, synthetic construct
  source 1..23: mol_type = other DNA
tggttagggctggaatagaagga

SEQ ID NO: 2767 - DNA, 23 bp, synthetic construct
  source 1..23: mol_type = other DNA
gtggttagggctggaatagaagg

SEQ ID NO: 2768 - DNA, 23 bp, synthetic construct
  source 1..23: mol_type = other DNA
agtggttagggctggaatagaag

SEQ ID NO: 2769 - DNA, 23 bp, synthetic construct
  source 1..23: mol_type = other DNA
gagtggttagggctggaatagaa

SEQ ID NO: 2770 - DNA, 23 bp, synthetic construct
  source 1..23: mol_type = other DNA
tgagtggttagggctggaataga

SEQ ID NO: 2771 - DNA, 23 bp, synthetic construct
  source 1..23: mol_type = other DNA
ctgagtggttagggctggaatag

SEQ ID NO: 2772 - DNA, 23 bp, synthetic construct
  source 1..23: mol_type = other DNA
cctgagtggttagggctggaata

SEQ ID NO: 2773 - DNA, 23 bp, synthetic construct
  source 1..23: mol_type = other DNA
tcctgagtggttagggctggaat

SEQ ID NO: 2774 - DNA, 23 bp, synthetic construct
  source 1..23: mol_type = other DNA
atcctgagtggttagggctggaa

SEQ ID NO: 2775 - DNA, 23 bp, synthetic construct
  source 1..23: mol_type = other DNA
aatcctgagtggttagggctgga

SEQ ID NO: 2776 - DNA, 23 bp, synthetic construct
  source 1..23: mol_type = other DNA
caatcctgagtggttagggctgg

SEQ ID NO: 2777 - DNA, 23 bp, synthetic construct
  source 1..23: mol_type = other DNA
ccaatcctgagtggttagggctg

SEQ ID NO: 2778 - DNA, 23 bp, synthetic construct
  source 1..23: mol_type = other DNA
cccaatcctgagtggttagggct

SEQ ID NO: 2779 - DNA, 23 bp, synthetic construct
  source 1..23: mol_type = other DNA
gcccaatcctgagtggttagggc

SEQ ID NO: 2780 - DNA, 23 bp, synthetic construct
  source 1..23: mol_type = other DNA
ggcccaatcctgagtggttaggg

SEQ ID NO: 2781 - DNA, 23 bp, synthetic construct
  source 1..23: mol_type = other DNA
cggcccaatcctgagtggttagg

SEQ ID NO: 2782 - DNA, 23 bp, synthetic construct
  source 1..23: mol_type = other DNA
acggcccaatcctgagtggttag

SEQ ID NO: 2783 - DNA, 23 bp, synthetic construct
  source 1..23: mol_type = other DNA
aacggcccaatcctgagtggtta

SEQ ID NO: 2784 - DNA, 23 bp, synthetic construct
  source 1..23: mol_type = other DNA
aaacggcccaatcctgagtggtt

SEQ ID NO: 2785 - DNA, 23 bp, synthetic construct
  source 1..23: mol_type = other DNA
caaacggcccaatcctgagtggt

SEQ ID NO: 2786 - DNA, 23 bp, synthetic construct
  source 1..23: mol_type = other DNA
acaaacggcccaatcctgagtgg

SEQ ID NO: 2787 - DNA, 23 bp, synthetic construct
  source 1..23: mol_type = other DNA
cacaaacggcccaatcctgagtg

SEQ ID NO: 2788 - DNA, 23 bp, synthetic construct
  source 1..23: mol_type = other DNA
acacaaacggcccaatcctgagt

SEQ ID NO: 2789 - DNA, 23 bp, synthetic construct
  source 1..23: mol_type = other DNA
gacacaaacggcccaatcctgag

SEQ ID NO: 2790 - DNA, 23 bp, synthetic construct
  source 1..23: mol_type = other DNA
agacacaaacggcccaatcctga

SEQ ID NO: 2791 - DNA, 23 bp, synthetic construct
  source 1..23: mol_type = other DNA
cagacacaaacggcccaatcctg

SEQ ID NO: 2792 - DNA, 23 bp, synthetic construct
  source 1..23: mol_type = other DNA
ccagacacaaacggcccaatcct

SEQ ID NO: 2793 - DNA, 23 bp, synthetic construct
  source 1..23: mol_type = other DNA
cccagacacaaacggcccaatcc

SEQ ID NO: 2794 - DNA, 23 bp, synthetic construct
  source 1..23: mol_type = other DNA
acccagacacaaacggcccaatc

SEQ ID NO: 2795 - DNA, 23 bp, synthetic construct
  source 1..23: mol_type = other DNA
tacccagacacaaacggcccaat

SEQ ID NO: 2796 - DNA, 23 bp, synthetic construct
  source 1..23: mol_type = other DNA
atacccagacacaaacggcccaa

SEQ ID NO: 2797 - DNA, 23 bp, synthetic construct
  source 1..23: mol_type = other DNA
catacccagacacaaacggccca

SEQ ID NO: 2798 - DNA, 23 bp, synthetic construct
  source 1..23: mol_type = other DNA
acatacccagacacaaacggccc

SEQ ID NO: 2799 - DNA, 23 bp, synthetic construct
  source 1..23: mol_type = other DNA
gacatacccagacacaaacggcc

SEQ ID NO: 2800 - DNA, 23 bp, synthetic construct
  source 1..23: mol_type = other DNA
agacatacccagacacaaacggc

SEQ ID NO: 2801 - DNA, 23 bp, synthetic construct
  source 1..23: mol_type = other DNA
gagacatacccagacacaaacgg

SEQ ID NO: 2802 - DNA, 23 bp, synthetic construct
  source 1..23: mol_type = other DNA
agagacatacccagacacaaacg

SEQ ID NO: 2803 - DNA, 23 bp, synthetic construct
  source 1..23: mol_type = other DNA
aagagacatacccagacacaaac

SEQ ID NO: 2804 - DNA, 23 bp, synthetic construct
  source 1..23: mol_type = other DNA
gaagagacatacccagacacaaa

SEQ ID NO: 2805 - DNA, 23 bp, synthetic construct
  source 1..23: mol_type = other DNA
ggaagagacatacccagacacaa

SEQ ID NO: 2806 - DNA, 23 bp, synthetic construct
  source 1..23: mol_type = other DNA
tggaagagacatacccagacaca

SEQ ID NO: 2807 - DNA, 23 bp, synthetic construct
  source 1..23: mol_type = other DNA
ctggaagagacatacccagacac

SEQ ID NO: 2808 - DNA, 23 bp, synthetic construct
  source 1..23: mol_type = other DNA
gctggaagagacatacccagaca

SEQ ID NO: 2809 - DNA, 23 bp, synthetic construct
  source 1..23: mol_type = other DNA
agctggaagagacatacccagac

SEQ ID NO: 2810 - DNA, 23 bp, synthetic construct
  source 1..23: mol_type = other DNA
cagctggaagagacatacccaga

SEQ ID NO: 2811 - DNA, 23 bp, synthetic construct
  source 1..23: mol_type = other DNA
gcagctggaagagacatacccag

SEQ ID NO: 2812 - DNA, 23 bp, synthetic construct
  source 1..23: mol_type = other DNA
ggcagctggaagagacataccca

SEQ ID NO: 2813 - DNA, 23 bp, synthetic construct
  source 1..23: mol_type = other DNA
aggcagctggaagagacataccc

SEQ ID NO: 2814 - DNA, 23 bp, synthetic construct
  source 1..23: mol_type = other DNA
caggcagctggaagagacatacc

SEQ ID NO: 2815 - DNA, 23 bp, synthetic construct
  source 1..23: mol_type = other DNA
ccaggcagctggaagagacatac

SEQ ID NO: 2816 - DNA, 23 bp, synthetic construct
  source 1..23: mol_type = other DNA
cccaggcagctggaagagacata

SEQ ID NO: 2817 - DNA, 23 bp, synthetic construct
  source 1..23: mol_type = other DNA
acccaggcagctggaagagacat

SEQ ID NO: 2818 - DNA, 23 bp, synthetic construct
  source 1..23: mol_type = other DNA
aacccaggcagctggaagagaca

SEQ ID NO: 2819 - DNA, 23 bp, synthetic construct
  source 1..23: mol_type = other DNA
aaacccaggcagctggaagagac

SEQ ID NO: 2820 - DNA, 23 bp, synthetic construct
  source 1..23: mol_type = other DNA
gaaacccaggcagctggaagaga

SEQ ID NO: 2821 - DNA, 23 bp, synthetic construct
  source 1..23: mol_type = other DNA
ggaaacccaggcagctggaagag

SEQ ID NO: 2822 - DNA, 23 bp, synthetic construct
  source 1..23: mol_type = other DNA
aggaaacccaggcagctggaaga

SEQ ID NO: 2823 - DNA, 23 bp, synthetic construct
  source 1..23: mol_type = other DNA
caggaaacccaggcagctggaag

SEQ ID NO: 2824 - DNA, 23 bp, synthetic construct
  source 1..23: mol_type = other DNA
ccaggaaacccaggcagctggaa

SEQ ID NO: 2825 - DNA, 23 bp, synthetic construct
  source 1..23: mol_type = other DNA
tccaggaaacccaggcagctgga

SEQ ID NO: 2826 - DNA, 23 bp, synthetic construct
  source 1..23: mol_type = other DNA
ttccaggaaacccaggcagctgg

SEQ ID NO: 2827 - DNA, 23 bp, synthetic construct
  source 1..23: mol_type = other DNA
tttccaggaaacccaggcagctg

SEQ ID NO: 2828 - DNA, 23 bp, synthetic construct
  source 1..23: mol_type = other DNA
ctttccaggaaacccaggcagct

SEQ ID NO: 2829 - DNA, 23 bp, synthetic construct
  source 1..23: mol_type = other DNA
tctttccaggaaacccaggcagc

SEQ ID NO: 2830 - DNA, 23 bp, synthetic construct
  source 1..23: mol_type = other DNA
ttctttccaggaaacccaggcag

SEQ ID NO: 2831 - DNA, 23 bp, synthetic construct
  source 1..23: mol_type = other DNA
gttctttccaggaaacccaggca

SEQ ID NO: 2832 - DNA, 23 bp, synthetic construct
  source 1..23: mol_type = other DNA
agttctttccaggaaacccaggc

SEQ ID NO: 2833 - DNA, 23 bp, synthetic construct
  source 1..23: mol_type = other DNA
gagttctttccaggaaacccagg

SEQ ID NO: 2834 - DNA, 23 bp, synthetic construct
  source 1..23: mol_type = other DNA
agagttctttccaggaaacccag

SEQ ID NO: 2835 - DNA, 23 bp, synthetic construct
  source 1..23: mol_type = other DNA
aagagttctttccaggaaaccca

SEQ ID NO: 2836 - DNA, 23 bp, synthetic construct
  source 1..23: mol_type = other DNA
taagagttctttccaggaaaccc

SEQ ID NO: 2837 - DNA, 23 bp, synthetic construct
  source 1..23: mol_type = other DNA
ataagagttctttccaggaaacc

SEQ ID NO: 2838 - DNA, 23 bp, synthetic construct
  source 1..23: mol_type = other DNA
gataagagttctttccaggaaac

SEQ ID NO: 2839 - DNA, 23 bp, synthetic construct
  source 1..23: mol_type = other DNA
ggataagagttctttccaggaaa

SEQ ID NO: 2840 - DNA, 23 bp, synthetic construct
  source 1..23: mol_type = other DNA
gggataagagttctttccaggaa

SEQ ID NO: 2841 - DNA, 23 bp, synthetic construct
  source 1..23: mol_type = other DNA
ggggataagagttctttccagga

SEQ ID NO: 2842 - DNA, 23 bp, synthetic construct
  source 1..23: mol_type = other DNA
tggggataagagttctttccagg

SEQ ID NO: 2843 - DNA, 23 bp, synthetic construct
  source 1..23: mol_type = other DNA
ctggggataagagttctttccag

SEQ ID NO: 2844 - DNA, 23 bp, synthetic construct
  source 1..23: mol_type = other DNA
cctggggataagagttctttcca

SEQ ID NO: 2845 - DNA, 23 bp, synthetic construct
  source 1..23: mol_type = other DNA
tcctggggataagagttctttcc

SEQ ID NO: 2846 - DNA, 23 bp, synthetic construct
  source 1..23: mol_type = other DNA
ttcctggggataagagttctttc

SEQ ID NO: 2847 - DNA, 23 bp, synthetic construct
  source 1..23: mol_type = other DNA
gttcctggggataagagttcttt

SEQ ID NO: 2848 - DNA, 23 bp, synthetic construct
  source 1..23: mol_type = other DNA
agttcctggggataagagttctt

SEQ ID NO: 2849 - DNA, 23 bp, synthetic construct
  source 1..23: mol_type = other DNA
tagttcctggggataagagttct

SEQ ID NO: 2850 - DNA, 23 bp, synthetic construct
  source 1..23: mol_type = other DNA
ctagttcctggggataagagttc

SEQ ID NO: 2851 - DNA, 23 bp, synthetic construct
  source 1..23: mol_type = other DNA
actagttcctggggataagagtt

SEQ ID NO: 2852 - DNA, 23 bp, synthetic construct
  source 1..23: mol_type = other DNA
aactagttcctggggataagagt

SEQ ID NO: 2853 - DNA, 23 bp, synthetic construct
  source 1..23: mol_type = other DNA
aaactagttcctggggataagag

SEQ ID NO: 2854 - DNA, 23 bp, synthetic construct
  source 1..23: mol_type = other DNA
caaactagttcctggggataaga

SEQ ID NO: 2855 - DNA, 23 bp, synthetic construct
  source 1..23: mol_type = other DNA
acaaactagttcctggggataag

SEQ ID NO: 2856 - DNA, 23 bp, synthetic construct
  source 1..23: mol_type = other DNA
aacaaactagttcctggggataa

SEQ ID NO: 2857 - DNA, 23 bp, synthetic construct
  source 1..23: mol_type = other DNA
caacaaactagttcctggggata

SEQ ID NO: 2858 - DNA, 23 bp, synthetic construct
  source 1..23: mol_type = other DNA
tcaacaaactagttcctggggat

SEQ ID NO: 2859 - DNA, 23 bp, synthetic construct
  source 1..23: mol_type = other DNA
ttcaacaaactagttcctgggga

SEQ ID NO: 2860 - DNA, 23 bp, synthetic construct
  source 1..23: mol_type = other DNA
attcaacaaactagttcctgggg

SEQ ID NO: 2861 - DNA, 23 bp, synthetic construct
  source 1..23: mol_type = other DNA
tattcaacaaactagttcctggg

SEQ ID NO: 2862 - DNA, 23 bp, synthetic construct
  source 1..23: mol_type = other DNA
ttattcaacaaactagttcctgg

SEQ ID NO: 2863 - DNA, 23 bp, synthetic construct
  source 1..23: mol_type = other DNA
tttattcaacaaactagttcctg

SEQ ID NO: 2864 - DNA, 23 bp, synthetic construct
  source 1..23: mol_type = other DNA
atttattcaacaaactagttcct

SEQ ID NO: 2865 - DNA, 23 bp, synthetic construct
  source 1..23: mol_type = other DNA
catttattcaacaaactagttcc

SEQ ID NO: 2866 - DNA, 23 bp, synthetic construct
  source 1..23: mol_type = other DNA
gcatttattcaacaaactagttc

SEQ ID NO: 2867 - DNA, 23 bp, synthetic construct
  source 1..23: mol_type = other DNA
agcatttattcaacaaactagtt

SEQ ID NO: 2868 - DNA, 23 bp, synthetic construct
  source 1..23: mol_type = other DNA
cagcatttattcaacaaactagt

SEQ ID NO: 2869 - DNA, 23 bp, synthetic construct
  source 1..23: mol_type = other DNA
ccagcatttattcaacaaactag

SEQ ID NO: 2870 - DNA, 23 bp, synthetic construct
  source 1..23: mol_type = other DNA
accagcatttattcaacaaacta

SEQ ID NO: 2871 - DNA, 23 bp, synthetic construct
  source 1..23: mol_type = other DNA
caccagcatttattcaacaaact

SEQ ID NO: 2872 - DNA, 23 bp, synthetic construct
  source 1..23: mol_type = other DNA
tcaccagcatttattcaacaaac

SEQ ID NO: 2873 - DNA, 23 bp, synthetic construct
  source 1..23: mol_type = other DNA
ttcaccagcatttattcaacaaa

SEQ ID NO: 2874 - DNA, 23 bp, synthetic construct
  source 1..23: mol_type = other DNA
attcaccagcatttattcaacaa

SEQ ID NO: 2875 - DNA, 23 bp, synthetic construct
  source 1..23: mol_type = other DNA
cattcaccagcatttattcaaca

SEQ ID NO: 2876 - DNA, 23 bp, synthetic construct
  source 1..23: mol_type = other DNA
tcattcaccagcatttattcaac

SEQ ID NO: 2877 - DNA, 23 bp, synthetic construct
  source 1..23: mol_type = other DNA
ttcattcaccagcatttattcaa

SEQ ID NO: 2878 - DNA, 23 bp, synthetic construct
  source 1..23: mol_type = other DNA
attcattcaccagcatttattca

SEQ ID NO: 2879 - DNA, 23 bp, synthetic construct
  source 1..23: mol_type = other DNA
cattcattcaccagcatttattc

SEQ ID NO: 2880 - DNA, 23 bp, synthetic construct
  source 1..23: mol_type = other DNA
tcattcattcaccagcatttatt

SEQ ID NO: 2881 - DNA, 23 bp, synthetic construct
  source 1..23: mol_type = other DNA
ttcattcattcaccagcatttat

SEQ ID NO: 2882 - DNA, 23 bp, synthetic construct
  source 1..23: mol_type = other DNA
attcattcattcaccagcattta

SEQ ID NO: 2883 - DNA, 23 bp, synthetic construct
  source 1..23: mol_type = other DNA
cattcattcattcaccagcattt

SEQ ID NO: 2884 - DNA, 23 bp, synthetic construct
  source 1..23: mol_type = other DNA
tcattcattcattcaccagcatt

SEQ ID NO: 2885 - DNA, 23 bp, synthetic construct
  source 1..23: mol_type = other DNA
atcattcattcattcaccagcat

SEQ ID NO: 2886 - DNA, 23 bp, synthetic construct
  source 1..23: mol_type = other DNA
aatcattcattcattcaccagca

SEQ ID NO: 2887 - DNA, 23 bp, synthetic construct
  source 1..23: mol_type = other DNA
caatcattcattcattcaccagc

SEQ ID NO: 2888 - DNA, 23 bp, synthetic construct
  source 1..23: mol_type = other DNA
tcaatcattcattcattcaccag

SEQ ID NO: 2889 - DNA, 23 bp, synthetic construct
  source 1..23: mol_type = other DNA
ttcaatcattcattcattcacca

SEQ ID NO: 2890 - DNA, 23 bp, synthetic construct
  source 1..23: mol_type = other DNA
gttcaatcattcattcattcacc

SEQ ID NO: 2891 - DNA, 23 bp, synthetic construct
  source 1..23: mol_type = other DNA
tgttcaatcattcattcattcac

SEQ ID NO: 2892 - DNA, 23 bp, synthetic construct
  source 1..23: mol_type = other DNA
ctgttcaatcattcattcattca

SEQ ID NO: 2893 - DNA, 23 bp, synthetic construct
  source 1..23: mol_type = other DNA
tctgttcaatcattcattcattc

SEQ ID NO: 2894 - DNA, 23 bp, synthetic construct
  source 1..23: mol_type = other DNA
atctgttcaatcattcattcatt

SEQ ID NO: 2895 - DNA, 23 bp, synthetic construct
  source 1..23: mol_type = other DNA
catctgttcaatcattcattcat

SEQ ID NO: 2896 - DNA, 23 bp, synthetic construct
  source 1..23: mol_type = other DNA
tcatctgttcaatcattcattca

SEQ ID NO: 2897 - DNA, 23 bp, synthetic construct
  source 1..23: mol_type = other DNA
ttcatctgttcaatcattcattc

SEQ ID NO: 2898 - DNA, 23 bp, synthetic construct
  source 1..23: mol_type = other DNA
attcatctgttcaatcattcatt

SEQ ID NO: 2899 - DNA, 23 bp, synthetic construct
  source 1..23: mol_type = other DNA
cattcatctgttcaatcattcat

SEQ ID NO: 2900 - DNA, 23 bp, synthetic construct
  source 1..23: mol_type = other DNA
tcattcatctgttcaatcattca

SEQ ID NO: 2901 - DNA, 23 bp, synthetic construct
  source 1..23: mol_type = other DNA
ctcattcatctgttcaatcattc

SEQ ID NO: 2902 - DNA, 23 bp, synthetic construct
  source 1..23: mol_type = other DNA
actcattcatctgttcaatcatt

SEQ ID NO: 2903 - DNA, 23 bp, synthetic construct
  source 1..23: mol_type = other DNA
cactcattcatctgttcaatcat

SEQ ID NO: 2904 - DNA, 23 bp, synthetic construct
  source 1..23: mol_type = other DNA
tcactcattcatctgttcaatca

SEQ ID NO: 2905 - DNA, 23 bp, synthetic construct
  source 1..23: mol_type = other DNA
atcactcattcatctgttcaatc

SEQ ID NO: 2906 - DNA, 23 bp, synthetic construct
  source 1..23: mol_type = other DNA
catcactcattcatctgttcaat

SEQ ID NO: 2907 - DNA, 23 bp, synthetic construct
  source 1..23: mol_type = other DNA
tcatcactcattcatctgttcaa

SEQ ID NO: 2908 - DNA, 23 bp, synthetic construct
  source 1..23: mol_type = other DNA
ctcatcactcattcatctgttca

SEQ ID NO: 2909 - DNA, 23 bp, synthetic construct
  source 1..23: mol_type = other DNA
actcatcactcattcatctgttc

SEQ ID NO: 2910 - DNA, 23 bp, synthetic construct
  source 1..23: mol_type = other DNA
tactcatcactcattcatctgtt

SEQ ID NO: 2911 - DNA, 23 bp, synthetic construct
  source 1..23: mol_type = other DNA
ctactcatcactcattcatctgt

SEQ ID NO: 2912 - DNA, 23 bp, synthetic construct
  source 1..23: mol_type = other DNA
tctactcatcactcattcatctg

SEQ ID NO: 2913 - DNA, 23 bp, synthetic construct
  source 1..23: mol_type = other DNA
atctactcatcactcattcatct

SEQ ID NO: 2914 - DNA, 23 bp, synthetic construct
  source 1..23: mol_type = other DNA
tatctactcatcactcattcatc

SEQ ID NO: 2915 - DNA, 23 bp, synthetic construct
  source 1..23: mol_type = other DNA
ttatctactcatcactcattcat

SEQ ID NO: 2916 - DNA, 23 bp, synthetic construct
  source 1..23: mol_type = other DNA
tttatctactcatcactcattca

SEQ ID NO: 2917 - DNA, 23 bp, synthetic construct
  source 1..23: mol_type = other DNA
ttttatctactcatcactcattc

SEQ ID NO: 2918 - DNA, 23 bp, synthetic construct
  source 1..23: mol_type = other DNA
cttttatctactcatcactcatt

SEQ ID NO: 2919 - DNA, 23 bp, synthetic construct
  source 1..23: mol_type = other DNA
ccttttatctactcatcactcat

SEQ ID NO: 2920 - DNA, 23 bp, synthetic construct
  source 1..23: mol_type = other DNA
tccttttatctactcatcactca

SEQ ID NO: 2921 - DNA, 23 bp, synthetic construct
  source 1..23: mol_type = other DNA
atccttttatctactcatcactc

SEQ ID NO: 2922 - DNA, 23 bp, synthetic construct
  source 1..23: mol_type = other DNA
catccttttatctactcatcact

SEQ ID NO: 2923 - DNA, 23 bp, synthetic construct
  source 1..23: mol_type = other DNA
ccatccttttatctactcatcac

SEQ ID NO: 2924 - DNA, 23 bp, synthetic construct
  source 1..23: mol_type = other DNA
tccatccttttatctactcatca

SEQ ID NO: 2925 - DNA, 23 bp, synthetic construct
  source 1..23: mol_type = other DNA
atccatccttttatctactcatc

SEQ ID NO: 2926 - DNA, 23 bp, synthetic construct
  source 1..23: mol_type = other DNA
catccatccttttatctactcat

SEQ ID NO: 2927 - DNA, 23 bp, synthetic construct
  source 1..23: mol_type = other DNA
ccatccatccttttatctactca

SEQ ID NO: 2928 - DNA, 23 bp, synthetic construct
  source 1..23: mol_type = other DNA
tccatccatccttttatctactc

SEQ ID NO: 2929 - DNA, 23 bp, synthetic construct
  source 1..23: mol_type = other DNA
ctccatccatccttttatctact

SEQ ID NO: 2930 - DNA, 23 bp, synthetic construct
  source 1..23: mol_type = other DNA
tctccatccatccttttatctac

SEQ ID NO: 2931 - DNA, 23 bp, synthetic construct
  source 1..23: mol_type = other DNA
ctctccatccatccttttatcta

SEQ ID NO: 2932 - DNA, 23 bp, synthetic construct
  source 1..23: mol_type = other DNA
tctctccatccatccttttatct

SEQ ID NO: 2933 - DNA, 23 bp, synthetic construct
  source 1..23: mol_type = other DNA
atctctccatccatccttttatc

SEQ ID NO: 2934 - DNA, 23 bp, synthetic construct
  source 1..23: mol_type = other DNA
catctctccatccatccttttat

SEQ ID NO: 2935 - DNA, 23 bp, synthetic construct
  source 1..23: mol_type = other DNA
ccatctctccatccatcctttta

SEQ ID NO: 2936 - DNA, 23 bp, synthetic construct
  source 1..23: mol_type = other DNA
cccatctctccatccatcctttt

SEQ ID NO: 2937 - DNA, 23 bp, synthetic construct
  source 1..23: mol_type = other DNA
acccatctctccatccatccttt

SEQ ID NO: 2938 - DNA, 23 bp, synthetic construct
  source 1..23: mol_type = other DNA
cacccatctctccatccatcctt

SEQ ID NO: 2939 - DNA, 23 bp, synthetic construct
  source 1..23: mol_type = other DNA
tcacccatctctccatccatcct

SEQ ID NO: 2940 - DNA, 23 bp, synthetic construct
  source 1..23: mol_type = other DNA
ctcacccatctctccatccatcc

SEQ ID NO: 2941 - DNA, 23 bp, synthetic construct
  source 1..23: mol_type = other DNA
actcacccatctctccatccatc

SEQ ID NO: 2942 - DNA, 23 bp, synthetic construct
  source 1..23: mol_type = other DNA
tactcacccatctctccatccat

SEQ ID NO: 2943 - DNA, 23 bp, synthetic construct
  source 1..23: mol_type = other DNA
gtactcacccatctctccatcca

SEQ ID NO: 2944 - DNA, 23 bp, synthetic construct
  source 1..23: mol_type = other DNA
tgtactcacccatctctccatcc

SEQ ID NO: 2945 - DNA, 23 bp, synthetic construct
  source 1..23: mol_type = other DNA
atgtactcacccatctctccatc

SEQ ID NO: 2946 - DNA, 23 bp, synthetic construct
  source 1..23: mol_type = other DNA
catgtactcacccatctctccat

SEQ ID NO: 2947 - DNA, 23 bp, synthetic construct
  source 1..23: mol_type = other DNA
ccatgtactcacccatctctcca

SEQ ID NO: 2948 - DNA, 23 bp, synthetic construct
  source 1..23: mol_type = other DNA
tccatgtactcacccatctctcc

SEQ ID NO: 2949 - DNA, 23 bp, synthetic construct
  source 1..23: mol_type = other DNA
atccatgtactcacccatctctc

SEQ ID NO: 2950 - DNA, 23 bp, synthetic construct
  source 1..23: mol_type = other DNA
catccatgtactcacccatctct

SEQ ID NO: 2951 - DNA, 23 bp, synthetic construct
  source 1..23: mol_type = other DNA
ccatccatgtactcacccatctc

SEQ ID NO: 2952 - DNA, 23 bp, synthetic construct
  source 1..23: mol_type = other DNA
tccatccatgtactcacccatct

SEQ ID NO: 2953 - DNA, 23 bp, synthetic construct
  source 1..23: mol_type = other DNA
atccatccatgtactcacccatc

SEQ ID NO: 2954 - DNA, 23 bp, synthetic construct
  source 1..23: mol_type = other DNA
tatccatccatgtactcacccat

SEQ ID NO: 2955 - DNA, 23 bp, synthetic construct
  source 1..23: mol_type = other DNA
ctatccatccatgtactcaccca

SEQ ID NO: 2956 - DNA, 23 bp, synthetic construct
  source 1..23: mol_type = other DNA
tctatccatccatgtactcaccc

SEQ ID NO: 2957 - DNA, 23 bp, synthetic construct
  source 1..23: mol_type = other DNA
atctatccatccatgtactcacc

SEQ ID NO: 2958 - DNA, 23 bp, synthetic construct
  source 1..23: mol_type = other DNA
catctatccatccatgtactcac

SEQ ID NO: 2959 - DNA, 23 bp, synthetic construct
  source 1..23: mol_type = other DNA
ccatctatccatccatgtactca

SEQ ID NO: 2960 - DNA, 23 bp, synthetic construct
  source 1..23: mol_type = other DNA
tccatctatccatccatgtactc

SEQ ID NO: 2961 - DNA, 23 bp, synthetic construct
  source 1..23: mol_type = other DNA
atccatctatccatccatgtact

SEQ ID NO: 2962 - DNA, 23 bp, synthetic construct
  source 1..23: mol_type = other DNA
catccatctatccatccatgtac

SEQ ID NO: 2963 - DNA, 23 bp, synthetic construct
  source 1..23: mol_type = other DNA
tcatccatctatccatccatgta

SEQ ID NO: 2964 - DNA, 23 bp, synthetic construct
  source 1..23: mol_type = other DNA
ctcatccatctatccatccatgt

SEQ ID NO: 2965 - DNA, 23 bp, synthetic construct
  source 1..23: mol_type = other DNA
actcatccatctatccatccatg

SEQ ID NO: 2966 - DNA, 23 bp, synthetic construct
  source 1..23: mol_type = other DNA
aactcatccatctatccatccat

SEQ ID NO: 2967 - DNA, 23 bp, synthetic construct
  source 1..23: mol_type = other DNA
caactcatccatctatccatcca

SEQ ID NO: 2968 - DNA, 23 bp, synthetic construct
  source 1..23: mol_type = other DNA
ccaactcatccatctatccatcc

SEQ ID NO: 2969 - DNA, 23 bp, synthetic construct
  source 1..23: mol_type = other DNA
accaactcatccatctatccatc

SEQ ID NO: 2970 - DNA, 23 bp, synthetic construct
  source 1..23: mol_type = other DNA
caccaactcatccatctatccat

SEQ ID NO: 2971 - DNA, 23 bp, synthetic construct
  source 1..23: mol_type = other DNA
ccaccaactcatccatctatcca

SEQ ID NO: 2972 - DNA, 23 bp, synthetic construct
  source 1..23: mol_type = other DNA
cccaccaactcatccatctatcc

SEQ ID NO: 2973 - DNA, 23 bp, synthetic construct
  source 1..23: mol_type = other DNA
acccaccaactcatccatctatc

SEQ ID NO: 2974 - DNA, 23 bp, synthetic construct
  source 1..23: mol_type = other DNA
tacccaccaactcatccatctat

SEQ ID NO: 2975 - DNA, 23 bp, synthetic construct
  source 1..23: mol_type = other DNA
ctacccaccaactcatccatcta

SEQ ID NO: 2976 - DNA, 23 bp, synthetic construct
  source 1..23: mol_type = other DNA
tctacccaccaactcatccatct

SEQ ID NO: 2977 - DNA, 23 bp, synthetic construct
  source 1..23: mol_type = other DNA
atctacccaccaactcatccatc

SEQ ID NO: 2978 - DNA, 23 bp, synthetic construct
  source 1..23: mol_type = other DNA
aatctacccaccaactcatccat

SEQ ID NO: 2979 - DNA, 23 bp, synthetic construct
  source 1..23: mol_type = other DNA
gaatctacccaccaactcatcca

SEQ ID NO: 2980 - DNA, 23 bp, synthetic construct
  source 1..23: mol_type = other DNA
cgaatctacccaccaactcatcc

SEQ ID NO: 2981 - DNA, 23 bp, synthetic construct
  source 1..23: mol_type = other DNA
acgaatctacccaccaactcatc

SEQ ID NO: 2982 - DNA, 23 bp, synthetic construct
  source 1..23: mol_type = other DNA
cacgaatctacccaccaactcat

SEQ ID NO: 2983 - DNA, 23 bp, synthetic construct
  source 1..23: mol_type = other DNA
ccacgaatctacccaccaactca

SEQ ID NO: 2984 - DNA, 23 bp, synthetic construct
  source 1..23: mol_type = other DNA
gccacgaatctacccaccaactc

SEQ ID NO: 2985 - DNA, 23 bp, synthetic construct
  source 1..23: mol_type = other DNA
agccacgaatctacccaccaact

SEQ ID NO: 2986 - DNA, 23 bp, synthetic construct
  source 1..23: mol_type = other DNA
tagccacgaatctacccaccaac

SEQ ID NO: 2987 - DNA, 23 bp, synthetic construct
  source 1..23: mol_type = other DNA
ctagccacgaatctacccaccaa

SEQ ID NO: 2988 - DNA, 23 bp, synthetic construct
  source 1..23: mol_type = other DNA
tctagccacgaatctacccacca

SEQ ID NO: 2989 - DNA, 23 bp, synthetic construct
  source 1..23: mol_type = other DNA
atctagccacgaatctacccacc

SEQ ID NO: 2990 - DNA, 23 bp, synthetic construct
  source 1..23: mol_type = other DNA
catctagccacgaatctacccac

SEQ ID NO: 2991 - DNA, 23 bp, synthetic construct
  source 1..23: mol_type = other DNA
ccatctagccacgaatctaccca

SEQ ID NO: 2992 - DNA, 23 bp, synthetic construct
  source 1..23: mol_type = other DNA
tccatctagccacgaatctaccc

SEQ ID NO: 2993 - DNA, 23 bp, synthetic construct
  source 1..23: mol_type = other DNA
atccatctagccacgaatctacc

SEQ ID NO: 2994 - DNA, 23 bp, synthetic construct
  source 1..23: mol_type = other DNA
catccatctagccacgaatctac

SEQ ID NO: 2995 - DNA, 23 bp, synthetic construct
  source 1..23: mol_type = other DNA
tcatccatctagccacgaatcta

SEQ ID NO: 2996 - DNA, 23 bp, synthetic construct
  source 1..23: mol_type = other DNA
atcatccatctagccacgaatct

SEQ ID NO: 2997 - DNA, 23 bp, synthetic construct
  source 1..23: mol_type = other DNA
catcatccatctagccacgaatc

SEQ ID NO: 2998 - DNA, 23 bp, synthetic construct
  source 1..23: mol_type = other DNA
ccatcatccatctagccacgaat

SEQ ID NO: 2999 - DNA, 23 bp, synthetic construct
  source 1..23: mol_type = other DNA
tccatcatccatctagccacgaa

SEQ ID NO: 3000 - DNA, 23 bp, synthetic construct
  source 1..23: mol_type = other DNA
atccatcatccatctagccacga

SEQ ID NO: 3001 - DNA, 23 bp, synthetic construct
  source 1..23: mol_type = other DNA
catccatcatccatctagccacg

SEQ ID NO: 3002 - DNA, 23 bp, synthetic construct
  source 1..23: mol_type = other DNA
ccatccatcatccatctagccac

SEQ ID NO: 3003 - DNA, 23 bp, synthetic construct
  source 1..23: mol_type = other DNA
tccatccatcatccatctagcca

SEQ ID NO: 3004 - DNA, 23 bp, synthetic construct
  source 1..23: mol_type = other DNA
atccatccatcatccatctagcc

SEQ ID NO: 3005 - DNA, 23 bp, synthetic construct
  source 1..23: mol_type = other DNA
catccatccatcatccatctagc

SEQ ID NO: 3006 - DNA, 23 bp, synthetic construct
  source 1..23: mol_type = other DNA
ccatccatccatcatccatctag

SEQ ID NO: 3007 - DNA, 23 bp, synthetic construct
  source 1..23: mol_type = other DNA
tccatccatccatcatccatcta

SEQ ID NO: 3008 - DNA, 23 bp, synthetic construct
  source 1..23: mol_type = other DNA
gtccatccatccatcatccatct

SEQ ID NO: 3009 - DNA, 23 bp, synthetic construct
  source 1..23: mol_type = other DNA
tgtccatccatccatcatccatc

SEQ ID NO: 3010 - DNA, 23 bp, synthetic construct
  source 1..23: mol_type = other DNA
ctgtccatccatccatcatccat

SEQ ID NO: 3011 - DNA, 23 bp, synthetic construct
  source 1..23: mol_type = other DNA
tctgtccatccatccatcatcca

SEQ ID NO: 3012 - DNA, 23 bp, synthetic construct
  source 1..23: mol_type = other DNA
atctgtccatccatccatcatcc

SEQ ID NO: 3013 - DNA, 23 bp, synthetic construct
  source 1..23: mol_type = other DNA
catctgtccatccatccatcatc

SEQ ID NO: 3014 - DNA, 23 bp, synthetic construct
  source 1..23: mol_type = other DNA
ccatctgtccatccatccatcat

SEQ ID NO: 3015 - DNA, 23 bp, synthetic construct
  source 1..23: mol_type = other DNA
tccatctgtccatccatccatca

SEQ ID NO: 3016 - DNA, 23 bp, synthetic construct
  source 1..23: mol_type = other DNA
atccatctgtccatccatccatc

SEQ ID NO: 3017 - DNA, 23 bp, synthetic construct
  source 1..23: mol_type = other DNA
catccatctgtccatccatccat

SEQ ID NO: 3018 - DNA, 23 bp, synthetic construct
  source 1..23: mol_type = other DNA
ccatccatctgtccatccatcca

SEQ ID NO: 3019 - DNA, 23 bp, synthetic construct
  source 1..23: mol_type = other DNA
tccatccatctgtccatccatcc

SEQ ID NO: 3020 - DNA, 23 bp, synthetic construct
  source 1..23: mol_type = other DNA
atccatccatctgtccatccatc

SEQ ID NO: 3021 - DNA, 23 bp, synthetic construct
  source 1..23: mol_type = other DNA
tatccatccatctgtccatccat

SEQ ID NO: 3022 - DNA, 23 bp, synthetic construct
  source 1..23: mol_type = other DNA
atatccatccatctgtccatcca

SEQ ID NO: 3023 - DNA, 23 bp, synthetic construct
  source 1..23: mol_type = other DNA
tatatccatccatctgtccatcc

SEQ ID NO: 3024 - DNA, 23 bp, synthetic construct
  source 1..23: mol_type = other DNA
atatatccatccatctgtccatc

SEQ ID NO: 3025 - DNA, 23 bp, synthetic construct
  source 1..23: mol_type = other DNA
catatatccatccatctgtccat

SEQ ID NO: 3026 - DNA, 23 bp, synthetic construct
  source 1..23: mol_type = other DNA
tcatatatccatccatctgtcca

SEQ ID NO: 3027 - DNA, 23 bp, synthetic construct
  source 1..23: mol_type = other DNA
atcatatatccatccatctgtcc

SEQ ID NO: 3028 - DNA, 23 bp, synthetic construct
  source 1..23: mol_type = other DNA
aatcatatatccatccatctgtc

SEQ ID NO: 3029 - DNA, 23 bp, synthetic construct
  source 1..23: mol_type = other DNA
caatcatatatccatccatctgt

SEQ ID NO: 3030 - DNA, 23 bp, synthetic construct
  source 1..23: mol_type = other DNA
tcaatcatatatccatccatctg

SEQ ID NO: 3031 - DNA, 23 bp, synthetic construct
  source 1..23: mol_type = other DNA
ttcaatcatatatccatccatct

SEQ ID NO: 3032 - DNA, 23 bp, synthetic construct
  source 1..23: mol_type = other DNA
gttcaatcatatatccatccatc

SEQ ID NO: 3033 - DNA, 23 bp, synthetic construct
  source 1..23: mol_type = other DNA
agttcaatcatatatccatccat

SEQ ID NO: 3034 - DNA, 23 bp, synthetic construct
  source 1..23: mol_type = other DNA
tagttcaatcatatatccatcca

SEQ ID NO: 3035 - DNA, 23 bp, synthetic construct
  source 1..23: mol_type = other DNA
atagttcaatcatatatccatcc

SEQ ID NO: 3036 - DNA, 23 bp, synthetic construct
  source 1..23: mol_type = other DNA
aatagttcaatcatatatccatc

SEQ ID NO: 3037 - DNA, 23 bp, synthetic construct
  source 1..23: mol_type = other DNA
caatagttcaatcatatatccat

SEQ ID NO: 3038 - DNA, 23 bp, synthetic construct
  source 1..23: mol_type = other DNA
tcaatagttcaatcatatatcca

SEQ ID NO: 3039 - DNA, 23 bp, synthetic construct
  source 1..23: mol_type = other DNA
ttcaatagttcaatcatatatcc

SEQ ID NO: 3040 - DNA, 23 bp, synthetic construct
  source 1..23: mol_type = other DNA
tttcaatagttcaatcatatatc

SEQ ID NO: 3041 - DNA, 23 bp, synthetic construct
  source 1..23: mol_type = other DNA
ctttcaatagttcaatcatatat

SEQ ID NO: 3042 - DNA, 23 bp, synthetic construct
  source 1..23: mol_type = other DNA
actttcaatagttcaatcatata

SEQ ID NO: 3043 - DNA, 23 bp, synthetic construct
  source 1..23: mol_type = other DNA
tactttcaatagttcaatcatat

SEQ ID NO: 3044 - DNA, 23 bp, synthetic construct
  source 1..23: mol_type = other DNA
atactttcaatagttcaatcata

SEQ ID NO: 3045 - DNA, 23 bp, synthetic construct
  source 1..23: mol_type = other DNA
tatactttcaatagttcaatcat

SEQ ID NO: 3046 - DNA, 23 bp, synthetic construct
  source 1..23: mol_type = other DNA
ctatactttcaatagttcaatca

SEQ ID NO: 3047 - DNA, 23 bp, synthetic construct
  source 1..23: mol_type = other DNA
tctatactttcaatagttcaatc

SEQ ID NO: 3048 - DNA, 23 bp, synthetic construct
  source 1..23: mol_type = other DNA
atctatactttcaatagttcaat

SEQ ID NO: 3049 - DNA, 23 bp, synthetic construct
  source 1..23: mol_type = other DNA
catctatactttcaatagttcaa

SEQ ID NO: 3050 - DNA, 23 bp, synthetic construct
  source 1..23: mol_type = other DNA
acatctatactttcaatagttca

SEQ ID NO: 3051 - DNA, 23 bp, synthetic construct
  source 1..23: mol_type = other DNA
tacatctatactttcaatagttc

SEQ ID NO: 3052 - DNA, 23 bp, synthetic construct
  source 1..23: mol_type = other DNA
atacatctatactttcaatagtt

SEQ ID NO: 3053 - DNA, 23 bp, synthetic construct
  source 1..23: mol_type = other DNA
catacatctatactttcaatagt

SEQ ID NO: 3054 - DNA, 23 bp, synthetic construct
  source 1..23: mol_type = other DNA
ccatacatctatactttcaatag

SEQ ID NO: 3055 - DNA, 23 bp, synthetic construct
  source 1..23: mol_type = other DNA
tccatacatctatactttcaata

SEQ ID NO: 3056 - DNA, 23 bp, synthetic construct
  source 1..23: mol_type = other DNA
atccatacatctatactttcaat

SEQ ID NO: 3057 - DNA, 23 bp, synthetic construct
  source 1..23: mol_type = other DNA
catccatacatctatactttcaa

SEQ ID NO: 3058 - DNA, 23 bp, synthetic construct
  source 1..23: mol_type = other DNA
ccatccatacatctatactttca

SEQ ID NO: 3059 - DNA, 23 bp, synthetic construct
  source 1..23: mol_type = other DNA
cccatccatacatctatactttc

SEQ ID NO: 3060 - DNA, 23 bp, synthetic construct
  source 1..23: mol_type = other DNA
acccatccatacatctatacttt

SEQ ID NO: 3061 - DNA, 23 bp, synthetic construct
  source 1..23: mol_type = other DNA
cacccatccatacatctatactt

SEQ ID NO: 3062 - DNA, 23 bp, synthetic construct
  source 1..23: mol_type = other DNA
tcacccatccatacatctatact

SEQ ID NO: 3063 - DNA, 23 bp, synthetic construct
  source 1..23: mol_type = other DNA
ttcacccatccatacatctatac

SEQ ID NO: 3064 - DNA, 23 bp, synthetic construct
  source 1..23: mol_type = other DNA
attcacccatccatacatctata

SEQ ID NO: 3065 - DNA, 23 bp, synthetic construct
  source 1..23: mol_type = other DNA
aattcacccatccatacatctat

SEQ ID NO: 3066 - DNA, 23 bp, synthetic construct
  source 1..23: mol_type = other DNA
aaattcacccatccatacatcta

SEQ ID NO: 3067 - DNA, 23 bp, synthetic construct
  source 1..23: mol_type = other DNA
caaattcacccatccatacatct

SEQ ID NO: 3068 - DNA, 23 bp, synthetic construct
  source 1..23: mol_type = other DNA
ccaaattcacccatccatacatc

SEQ ID NO: 3069 - DNA, 23 bp, synthetic construct
  source 1..23: mol_type = other DNA
cccaaattcacccatccatacat

SEQ ID NO: 3070 - DNA, 23 bp, synthetic construct
  source 1..23: mol_type = other DNA
ccccaaattcacccatccataca

SEQ ID NO: 3071 - DNA, 23 bp, synthetic construct
  source 1..23: mol_type = other DNA
cccccaaattcacccatccatac

SEQ ID NO: 3072 - DNA, 23 bp, synthetic construct
  source 1..23: mol_type = other DNA
acccccaaattcacccatccata

SEQ ID NO: 3073 - DNA, 23 bp, synthetic construct
  source 1..23: mol_type = other DNA
tacccccaaattcacccatccat

SEQ ID NO: 3074 - DNA, 23 bp, synthetic construct
  source 1..23: mol_type = other DNA
ttacccccaaattcacccatcca

SEQ ID NO: 3075 - DNA, 23 bp, synthetic construct
  source 1..23: mol_type = other DNA
attacccccaaattcacccatcc

SEQ ID NO: 3076 - DNA, 23 bp, synthetic construct
  source 1..23: mol_type = other DNA
aattacccccaaattcacccatc

SEQ ID NO: 3077 - DNA, 23 bp, synthetic construct
  source 1..23: mol_type = other DNA
caattacccccaaattcacccat

SEQ ID NO: 3078 - DNA, 23 bp, synthetic construct
  source 1..23: mol_type = other DNA
acaattacccccaaattcaccca

SEQ ID NO: 3079 - DNA, 23 bp, synthetic construct
  source 1..23: mol_type = other DNA
aacaattacccccaaattcaccc

SEQ ID NO: 3080 - DNA, 23 bp, synthetic construct
  source 1..23: mol_type = other DNA
taacaattacccccaaattcacc

SEQ ID NO: 3081 - DNA, 23 bp, synthetic construct
  source 1..23: mol_type = other DNA
ctaacaattacccccaaattcac

SEQ ID NO: 3082 - DNA, 23 bp, synthetic construct
  source 1..23: mol_type = other DNA
tctaacaattacccccaaattca

SEQ ID NO: 3083 - DNA, 23 bp, synthetic construct
  source 1..23: mol_type = other DNA
atctaacaattacccccaaattc

SEQ ID NO: 3084 - DNA, 23 bp, synthetic construct
  source 1..23: mol_type = other DNA
catctaacaattacccccaaatt

SEQ ID NO: 3085 - DNA, 23 bp, synthetic construct
  source 1..23: mol_type = other DNA
tcatctaacaattacccccaaat

SEQ ID NO: 3086 - DNA, 23 bp, synthetic construct
  source 1..23: mol_type = other DNA
atcatctaacaattacccccaaa

SEQ ID NO: 3087 - DNA, 23 bp, synthetic construct
  source 1..23: mol_type = other DNA
catcatctaacaattacccccaa

SEQ ID NO: 3088 - DNA, 23 bp, synthetic construct
  source 1..23: mol_type = other DNA
ccatcatctaacaattaccccca

SEQ ID NO: 3089 - DNA, 23 bp, synthetic construct
  source 1..23: mol_type = other DNA
tccatcatctaacaattaccccc

SEQ ID NO: 3090 - DNA, 23 bp, synthetic construct
  source 1..23: mol_type = other DNA
atccatcatctaacaattacccc

SEQ ID NO: 3091 - DNA, 23 bp, synthetic construct
  source 1..23: mol_type = other DNA
catccatcatctaacaattaccc

SEQ ID NO: 3092 - DNA, 23 bp, synthetic construct
  source 1..23: mol_type = other DNA
tcatccatcatctaacaattacc

SEQ ID NO: 3093 - DNA, 23 bp, synthetic construct
  source 1..23: mol_type = other DNA
ctcatccatcatctaacaattac

SEQ ID NO: 3094 - DNA, 23 bp, synthetic construct
  source 1..23: mol_type = other DNA
actcatccatcatctaacaatta

SEQ ID NO: 3095 - DNA, 23 bp, synthetic construct
  source 1..23: mol_type = other DNA
tactcatccatcatctaacaatt

SEQ ID NO: 3096 - DNA, 23 bp, synthetic construct
  source 1..23: mol_type = other DNA
atactcatccatcatctaacaat

SEQ ID NO: 3097 - DNA, 23 bp, synthetic construct
  source 1..23: mol_type = other DNA
tatactcatccatcatctaacaa

SEQ ID NO: 3098 - DNA, 23 bp, synthetic construct
  source 1..23: mol_type = other DNA
ctatactcatccatcatctaaca

SEQ ID NO: 3099 - DNA, 23 bp, synthetic construct
  source 1..23: mol_type = other DNA
tctatactcatccatcatctaac

SEQ ID NO: 3100 - DNA, 23 bp, synthetic construct
  source 1..23: mol_type = other DNA
atctatactcatccatcatctaa

SEQ ID NO: 3101 - DNA, 23 bp, synthetic construct
  source 1..23: mol_type = other DNA
catctatactcatccatcatcta

SEQ ID NO: 3102 - DNA, 23 bp, synthetic construct
  source 1..23: mol_type = other DNA
tcatctatactcatccatcatct

SEQ ID NO: 3103 - DNA, 23 bp, synthetic construct
  source 1..23: mol_type = other DNA
ttcatctatactcatccatcatc

SEQ ID NO: 3104 - DNA, 23 bp, synthetic construct
  source 1..23: mol_type = other DNA
attcatctatactcatccatcat

SEQ ID NO: 3105 - DNA, 23 bp, synthetic construct
  source 1..23: mol_type = other DNA
cattcatctatactcatccatca

SEQ ID NO: 3106 - DNA, 23 bp, synthetic construct
  source 1..23: mol_type = other DNA
tcattcatctatactcatccatc

SEQ ID NO: 3107 - DNA, 23 bp, synthetic construct
  source 1..23: mol_type = other DNA
atcattcatctatactcatccat

SEQ ID NO: 3108 - DNA, 23 bp, synthetic construct
  source 1..23: mol_type = other DNA
catcattcatctatactcatcca

SEQ ID NO: 3109 - DNA, 23 bp, synthetic construct
  source 1..23: mol_type = other DNA
ccatcattcatctatactcatcc

SEQ ID NO: 3110 - DNA, 23 bp, synthetic construct
  source 1..23: mol_type = other DNA
tccatcattcatctatactcatc

SEQ ID NO: 3111 - DNA, 23 bp, synthetic construct
  source 1..23: mol_type = other DNA
atccatcattcatctatactcat

SEQ ID NO: 3112 - DNA, 23 bp, synthetic construct
  source 1..23: mol_type = other DNA
catccatcattcatctatactca

SEQ ID NO: 3113 - DNA, 23 bp, synthetic construct
  source 1..23: mol_type = other DNA
ccatccatcattcatctatactc

SEQ ID NO: 3114 - DNA, 23 bp, synthetic construct
  source 1..23: mol_type = other DNA
tccatccatcattcatctatact

SEQ ID NO: 3115 - DNA, 23 bp, synthetic construct
  source 1..23: mol_type = other DNA
atccatccatcattcatctatac

SEQ ID NO: 3116 - DNA, 23 bp, synthetic construct
  source 1..23: mol_type = other DNA
tatccatccatcattcatctata

SEQ ID NO: 3117 - DNA, 23 bp, synthetic construct
  source 1..23: mol_type = other DNA
ttatccatccatcattcatctat

SEQ ID NO: 3118 - DNA, 23 bp, synthetic construct
  source 1..23: mol_type = other DNA
gttatccatccatcattcatcta

SEQ ID NO: 3119 - DNA, 23 bp, synthetic construct
  source 1..23: mol_type = other DNA
agttatccatccatcattcatct

SEQ ID NO: 3120 - DNA, 23 bp, synthetic construct
  source 1..23: mol_type = other DNA
aagttatccatccatcattcatc

SEQ ID NO: 3121 - DNA, 23 bp, synthetic construct
  source 1..23: mol_type = other DNA
caagttatccatccatcattcat

SEQ ID NO: 3122 - DNA, 23 bp, synthetic construct
  source 1..23: mol_type = other DNA
tcaagttatccatccatcattca

SEQ ID NO: 3123 - DNA, 23 bp, synthetic construct
  source 1..23: mol_type = other DNA
atcaagttatccatccatcattc

SEQ ID NO: 3124 - DNA, 23 bp, synthetic construct
  source 1..23: mol_type = other DNA
catcaagttatccatccatcatt

SEQ ID NO: 3125 - DNA, 23 bp, synthetic construct
  source 1..23: mol_type = other DNA
tcatcaagttatccatccatcat

SEQ ID NO: 3126 - DNA, 23 bp, synthetic construct
  source 1..23: mol_type = other DNA
ctcatcaagttatccatccatca

SEQ ID NO: 3127 - DNA, 23 bp, synthetic construct
  source 1..23: mol_type = other DNA
actcatcaagttatccatccatc

SEQ ID NO: 3128 - DNA, 23 bp, synthetic construct
  source 1..23: mol_type = other DNA
cactcatcaagttatccatccat

SEQ ID NO: 3129 - DNA, 23 bp, synthetic construct
  source 1..23: mol_type = other DNA
ccactcatcaagttatccatcca

SEQ ID NO: 3130 - DNA, 23 bp, synthetic construct
  source 1..23: mol_type = other DNA
tccactcatcaagttatccatcc

SEQ ID NO: 3131 - DNA, 23 bp, synthetic construct
  source 1..23: mol_type = other DNA
atccactcatcaagttatccatc

SEQ ID NO: 3132 - DNA, 23 bp, synthetic construct
  source 1..23: mol_type = other DNA
tatccactcatcaagttatccat

SEQ ID NO: 3133 - DNA, 23 bp, synthetic construct
  source 1..23: mol_type = other DNA
ctatccactcatcaagttatcca

SEQ ID NO: 3134 - DNA, 23 bp, synthetic construct
  source 1..23: mol_type = other DNA
tctatccactcatcaagttatcc

SEQ ID NO: 3135 - DNA, 23 bp, synthetic construct
  source 1..23: mol_type = other DNA
atctatccactcatcaagttatc

SEQ ID NO: 3136 - DNA, 23 bp, synthetic construct
  source 1..23: mol_type = other DNA
tatctatccactcatcaagttat

SEQ ID NO: 3137 - DNA, 23 bp, synthetic construct
  source 1..23: mol_type = other DNA
ctatctatccactcatcaagtta

SEQ ID NO: 3138 - DNA, 23 bp, synthetic construct
  source 1..23: mol_type = other DNA
tctatctatccactcatcaagtt

SEQ ID NO: 3139 - DNA, 23 bp, synthetic construct
  source 1..23: mol_type = other DNA
atctatctatccactcatcaagt

SEQ ID NO: 3140 - DNA, 23 bp, synthetic construct
  source 1..23: mol_type = other DNA
aatctatctatccactcatcaag

SEQ ID NO: 3141 - DNA, 23 bp, synthetic construct
  source 1..23: mol_type = other DNA
caatctatctatccactcatcaa

SEQ ID NO: 3142 - DNA, 23 bp, synthetic construct
  source 1..23: mol_type = other DNA
gcaatctatctatccactcatca

SEQ ID NO: 3143 - DNA, 23 bp, synthetic construct
  source 1..23: mol_type = other DNA
agcaatctatctatccactcatc

SEQ ID NO: 3144 - DNA, 23 bp, synthetic construct
  source 1..23: mol_type = other DNA
cagcaatctatctatccactcat

SEQ ID NO: 3145 - DNA, 23 bp, synthetic construct
  source 1..23: mol_type = other DNA
ccagcaatctatctatccactca

SEQ ID NO: 3146 - DNA, 23 bp, synthetic construct
  source 1..23: mol_type = other DNA
tccagcaatctatctatccactc

SEQ ID NO: 3147 - DNA, 23 bp, synthetic construct
  source 1..23: mol_type = other DNA
atccagcaatctatctatccact

SEQ ID NO: 3148 - DNA, 23 bp, synthetic construct
  source 1..23: mol_type = other DNA
tatccagcaatctatctatccac

SEQ ID NO: 3149 - DNA, 23 bp, synthetic construct
  source 1..23: mol_type = other DNA
ctatccagcaatctatctatcca

SEQ ID NO: 3150 - DNA, 23 bp, synthetic construct
  source 1..23: mol_type = other DNA
tctatccagcaatctatctatcc

SEQ ID NO: 3151 - DNA, 23 bp, synthetic construct
  source 1..23: mol_type = other DNA
atctatccagcaatctatctatc

SEQ ID NO: 3152 - DNA, 23 bp, synthetic construct
  source 1..23: mol_type = other DNA
catctatccagcaatctatctat

SEQ ID NO: 3153 - DNA, 23 bp, synthetic construct
  source 1..23: mol_type = other DNA
tcatctatccagcaatctatcta

SEQ ID NO: 3154 - DNA, 23 bp, synthetic construct
  source 1..23: mol_type = other DNA
atcatctatccagcaatctatct

SEQ ID NO: 3155 - DNA, 23 bp, synthetic construct
  source 1..23: mol_type = other DNA
aatcatctatccagcaatctatc

SEQ ID NO: 3156 - DNA, 23 bp, synthetic construct
  source 1..23: mol_type = other DNA
caatcatctatccagcaatctat

SEQ ID NO: 3157 - DNA, 23 bp, synthetic construct
  source 1..23: mol_type = other DNA
tcaatcatctatccagcaatcta

SEQ ID NO: 3158 - DNA, 23 bp, synthetic construct
  source 1..23: mol_type = other DNA
gtcaatcatctatccagcaatct

SEQ ID NO: 3159 - DNA, 23 bp, synthetic construct
  source 1..23: mol_type = other DNA
agtcaatcatctatccagcaatc

SEQ ID NO: 3160 - DNA, 23 bp, synthetic construct
  source 1..23: mol_type = other DNA
cagtcaatcatctatccagcaat

SEQ ID NO: 3161 - DNA, 23 bp, synthetic construct
  source 1..23: mol_type = other DNA
ccagtcaatcatctatccagcaa

SEQ ID NO: 3162 - DNA, 23 bp, synthetic construct
  source 1..23: mol_type = other DNA
cccagtcaatcatctatccagca

SEQ ID NO: 3163 - DNA, 23 bp, synthetic construct
  source 1..23: mol_type = other DNA
acccagtcaatcatctatccagc

SEQ ID NO: 3164 - DNA, 23 bp, synthetic construct
  source 1..23: mol_type = other DNA
cacccagtcaatcatctatccag

SEQ ID NO: 3165 - DNA, 23 bp, synthetic construct
  source 1..23: mol_type = other DNA
ccacccagtcaatcatctatcca

SEQ ID NO: 3166 - DNA, 23 bp, synthetic construct
  source 1..23: mol_type = other DNA
tccacccagtcaatcatctatcc

SEQ ID NO: 3167 - DNA, 23 bp, synthetic construct
  source 1..23: mol_type = other DNA
atccacccagtcaatcatctatc

SEQ ID NO: 3168 - DNA, 23 bp, synthetic construct
  source 1..23: mol_type = other DNA
tatccacccagtcaatcatctat

SEQ ID NO: 3169 - DNA, 23 bp, synthetic construct
  source 1..23: mol_type = other DNA
ctatccacccagtcaatcatcta

SEQ ID NO: 3170 - DNA, 23 bp, synthetic construct
  source 1..23: mol_type = other DNA
tctatccacccagtcaatcatct

SEQ ID NO: 3171 - DNA, 23 bp, synthetic construct
  source 1..23: mol_type = other DNA
atctatccacccagtcaatcatc

SEQ ID NO: 3172 - DNA, 23 bp, synthetic construct
  source 1..23: mol_type = other DNA
catctatccacccagtcaatcat

SEQ ID NO: 3173 - DNA, 23 bp, synthetic construct
  source 1..23: mol_type = other DNA
tcatctatccacccagtcaatca

SEQ ID NO: 3174 - DNA, 23 bp, synthetic construct
  source 1..23: mol_type = other DNA
ttcatctatccacccagtcaatc

SEQ ID NO: 3175 - DNA, 23 bp, synthetic construct
  source 1..23: mol_type = other DNA
tttcatctatccacccagtcaat

SEQ ID NO: 3176 - DNA, 23 bp, synthetic construct
  source 1..23: mol_type = other DNA
atttcatctatccacccagtcaa

SEQ ID NO: 3177 - DNA, 23 bp, synthetic construct
  source 1..23: mol_type = other DNA
catttcatctatccacccagtca

SEQ ID NO: 3178 - DNA, 23 bp, synthetic construct
  source 1..23: mol_type = other DNA
acatttcatctatccacccagtc

SEQ ID NO: 3179 - DNA, 23 bp, synthetic construct
  source 1..23: mol_type = other DNA
aacatttcatctatccacccagt

SEQ ID NO: 3180 - DNA, 23 bp, synthetic construct
  source 1..23: mol_type = other DNA
caacatttcatctatccacccag

SEQ ID NO: 3181 - DNA, 23 bp, synthetic construct
  source 1..23: mol_type = other DNA
ccaacatttcatctatccaccca

SEQ ID NO: 3182 - DNA, 23 bp, synthetic construct
  source 1..23: mol_type = other DNA
tccaacatttcatctatccaccc

SEQ ID NO: 3183 - DNA, 23 bp, synthetic construct
  source 1..23: mol_type = other DNA
atccaacatttcatctatccacc

SEQ ID NO: 3184 - DNA, 23 bp, synthetic construct
  source 1..23: mol_type = other DNA
catccaacatttcatctatccac

SEQ ID NO: 3185 - DNA, 23 bp, synthetic construct
  source 1..23: mol_type = other DNA
tcatccaacatttcatctatcca

SEQ ID NO: 3186 - DNA, 23 bp, synthetic construct
  source 1..23: mol_type = other DNA
ctcatccaacatttcatctatcc

SEQ ID NO: 3187 - DNA, 23 bp, synthetic construct
  source 1..23: mol_type = other DNA
gctcatccaacatttcatctatc

SEQ ID NO: 3188 - DNA, 23 bp, synthetic construct
  source 1..23: mol_type = other DNA
tgctcatccaacatttcatctat

SEQ ID NO: 3189 - DNA, 23 bp, synthetic construct
  source 1..23: mol_type = other DNA
ctgctcatccaacatttcatcta

SEQ ID NO: 3190 - DNA, 23 bp, synthetic construct
  source 1..23: mol_type = other DNA
tctgctcatccaacatttcatct

SEQ ID NO: 3191 - DNA, 23 bp, synthetic construct
  source 1..23: mol_type = other DNA
atctgctcatccaacatttcatc

SEQ ID NO: 3192 - DNA, 23 bp, synthetic construct
  source 1..23: mol_type = other DNA
aatctgctcatccaacatttcat

SEQ ID NO: 3193 - DNA, 23 bp, synthetic construct
  source 1..23: mol_type = other DNA
taatctgctcatccaacatttca

SEQ ID NO: 3194 - DNA, 23 bp, synthetic construct
  source 1..23: mol_type = other DNA
ttaatctgctcatccaacatttc

SEQ ID NO: 3195 - DNA, 23 bp, synthetic construct
  source 1..23: mol_type = other DNA
cttaatctgctcatccaacattt

SEQ ID NO: 3196 - DNA, 23 bp, synthetic construct
  source 1..23: mol_type = other DNA
acttaatctgctcatccaacatt

SEQ ID NO: 3197 - DNA, 23 bp, synthetic construct
  source 1..23: mol_type = other DNA
aacttaatctgctcatccaacat

SEQ ID NO: 3198 - DNA, 23 bp, synthetic construct
  source 1..23: mol_type = other DNA
caacttaatctgctcatccaaca

SEQ ID NO: 3199 - DNA, 23 bp, synthetic construct
  source 1..23: mol_type = other DNA
acaacttaatctgctcatccaac

SEQ ID NO: 3200 - DNA, 23 bp, synthetic construct
  source 1..23: mol_type = other DNA
tacaacttaatctgctcatccaa

SEQ ID NO: 3201 - DNA, 23 bp, synthetic construct
  source 1..23: mol_type = other DNA
atacaacttaatctgctcatcca

SEQ ID NO: 3202 - DNA, 23 bp, synthetic construct
  source 1..23: mol_type = other DNA
aatacaacttaatctgctcatcc

SEQ ID NO: 3203 - DNA, 23 bp, synthetic construct
  source 1..23: mol_type = other DNA
caatacaacttaatctgctcatc

SEQ ID NO: 3204 - DNA, 23 bp, synthetic construct
  source 1..23: mol_type = other DNA
ccaatacaacttaatctgctcat

SEQ ID NO: 3205 - DNA, 23 bp, synthetic construct
  source 1..23: mol_type = other DNA
tccaatacaacttaatctgctca

SEQ ID NO: 3206 - DNA, 23 bp, synthetic construct
  source 1..23: mol_type = other DNA
atccaatacaacttaatctgctc

SEQ ID NO: 3207 - DNA, 23 bp, synthetic construct
  source 1..23: mol_type = other DNA
catccaatacaacttaatctgct

SEQ ID NO: 3208 - DNA, 23 bp, synthetic construct
  source 1..23: mol_type = other DNA
ccatccaatacaacttaatctgc

SEQ ID NO: 3209 - DNA, 23 bp, synthetic construct
  source 1..23: mol_type = other DNA
cccatccaatacaacttaatctg

SEQ ID NO: 3210 - DNA, 23 bp, synthetic construct
  source 1..23: mol_type = other DNA
tcccatccaatacaacttaatct

SEQ ID NO: 3211 - DNA, 23 bp, synthetic construct
  source 1..23: mol_type = other DNA
atcccatccaatacaacttaatc

SEQ ID NO: 3212 - DNA, 23 bp, synthetic construct
  source 1..23: mol_type = other DNA
catcccatccaatacaacttaat

SEQ ID NO: 3213 - DNA, 23 bp, synthetic construct
  source 1..23: mol_type = other DNA
ccatcccatccaatacaacttaa

SEQ ID NO: 3214 - DNA, 23 bp, synthetic construct
  source 1..23: mol_type = other DNA
tccatcccatccaatacaactta

SEQ ID NO: 3215 - DNA, 23 bp, synthetic construct
  source 1..23: mol_type = other DNA
atccatcccatccaatacaactt

SEQ ID NO: 3216 - DNA, 23 bp, synthetic construct
  source 1..23: mol_type = other DNA
catccatcccatccaatacaact

SEQ ID NO: 3217 - DNA, 23 bp, synthetic construct
  source 1..23: mol_type = other DNA
ccatccatcccatccaatacaac

SEQ ID NO: 3218 - DNA, 23 bp, synthetic construct
  source 1..23: mol_type = other DNA
tccatccatcccatccaatacaa

SEQ ID NO: 3219 - DNA, 23 bp, synthetic construct
  source 1..23: mol_type = other DNA
ttccatccatcccatccaataca

SEQ ID NO: 3220 - DNA, 23 bp, synthetic construct
  source 1..23: mol_type = other DNA
cttccatccatcccatccaatac

SEQ ID NO: 3221 - DNA, 23 bp, synthetic construct
  source 1..23: mol_type = other DNA
acttccatccatcccatccaata

SEQ ID NO: 3222 - DNA, 23 bp, synthetic construct
  source 1..23: mol_type = other DNA
cacttccatccatcccatccaat

SEQ ID NO: 3223 - DNA, 23 bp, synthetic construct
  source 1..23: mol_type = other DNA
acacttccatccatcccatccaa

SEQ ID NO: 3224 - DNA, 23 bp, synthetic construct
  source 1..23: mol_type = other DNA
cacacttccatccatcccatcca

SEQ ID NO: 3225 - DNA, 23 bp, synthetic construct
  source 1..23: mol_type = other DNA
ccacacttccatccatcccatcc

SEQ ID NO: 3226 - DNA, 23 bp, synthetic construct
  source 1..23: mol_type = other DNA
accacacttccatccatcccatc

SEQ ID NO: 3227 - DNA, 23 bp, synthetic construct
  source 1..23: mol_type = other DNA
aaccacacttccatccatcccat

SEQ ID NO: 3228 - DNA, 23 bp, synthetic construct
  source 1..23: mol_type = other DNA
caaccacacttccatccatccca

SEQ ID NO: 3229 - DNA, 23 bp, synthetic construct
  source 1..23: mol_type = other DNA
tcaaccacacttccatccatccc

SEQ ID NO: 3230 - DNA, 23 bp, synthetic construct
  source 1..23: mol_type = other DNA
ctcaaccacacttccatccatcc

SEQ ID NO: 3231 - DNA, 23 bp, synthetic construct
  source 1..23: mol_type = other DNA
actcaaccacacttccatccatc

SEQ ID NO: 3232 - DNA, 23 bp, synthetic construct
  source 1..23: mol_type = other DNA
aactcaaccacacttccatccat

SEQ ID NO: 3233 - DNA, 23 bp, synthetic construct
  source 1..23: mol_type = other DNA
taactcaaccacacttccatcca

SEQ ID NO: 3234 - DNA, 23 bp, synthetic construct
  source 1..23: mol_type = other DNA
ataactcaaccacacttccatcc

SEQ ID NO: 3235 - DNA, 23 bp, synthetic construct
  source 1..23: mol_type = other DNA
aataactcaaccacacttccatc

SEQ ID NO: 3236 - DNA, 23 bp, synthetic construct
  source 1..23: mol_type = other DNA
taataactcaaccacacttccat

SEQ ID NO: 3237 - DNA, 23 bp, synthetic construct
  source 1..23: mol_type = other DNA
ctaataactcaaccacacttcca

SEQ ID NO: 3238 - DNA, 23 bp, synthetic construct
  source 1..23: mol_type = other DNA
tctaataactcaaccacacttcc

SEQ ID NO: 3239 - DNA, 23 bp, synthetic construct
  source 1..23: mol_type = other DNA
ttctaataactcaaccacacttc

SEQ ID NO: 3240 - DNA, 23 bp, synthetic construct
  source 1..23: mol_type = other DNA
cttctaataactcaaccacactt

SEQ ID NO: 3241 - DNA, 23 bp, synthetic construct
  source 1..23: mol_type = other DNA
ccttctaataactcaaccacact

SEQ ID NO: 3242 - DNA, 23 bp, synthetic construct
  source 1..23: mol_type = other DNA
tccttctaataactcaaccacac

SEQ ID NO: 3243 - DNA, 23 bp, synthetic construct
  source 1..23: mol_type = other DNA
ttccttctaataactcaaccaca

SEQ ID NO: 3244 - DNA, 23 bp, synthetic construct
  source 1..23: mol_type = other DNA
cttccttctaataactcaaccac

SEQ ID NO: 3245 - DNA, 23 bp, synthetic construct
  source 1..23: mol_type = other DNA
tcttccttctaataactcaacca

SEQ ID NO: 3246 - DNA, 23 bp, synthetic construct
  source 1..23: mol_type = other DNA
atcttccttctaataactcaacc

SEQ ID NO: 3247 - DNA, 23 bp, synthetic construct
  source 1..23: mol_type = other DNA
aatcttccttctaataactcaac

SEQ ID NO: 3248 - DNA, 23 bp, synthetic construct
  source 1..23: mol_type = other DNA
caatcttccttctaataactcaa

SEQ ID NO: 3249 - DNA, 23 bp, synthetic construct
  source 1..23: mol_type = other DNA
tcaatcttccttctaataactca

SEQ ID NO: 3250 - DNA, 23 bp, synthetic construct
  source 1..23: mol_type = other DNA
ctcaatcttccttctaataactc

SEQ ID NO: 3251 - DNA, 23 bp, synthetic construct
  source 1..23: mol_type = other DNA
actcaatcttccttctaataact

SEQ ID NO: 3252 - DNA, 23 bp, synthetic construct
  source 1..23: mol_type = other DNA
tactcaatcttccttctaataac

SEQ ID NO: 3253 - DNA, 23 bp, synthetic construct
  source 1..23: mol_type = other DNA
ctactcaatcttccttctaataa

SEQ ID NO: 3254 - DNA, 23 bp, synthetic construct
  source 1..23: mol_type = other DNA
tctactcaatcttccttctaata

SEQ ID NO: 3255 - DNA, 23 bp, synthetic construct
  source 1..23: mol_type = other DNA
atctactcaatcttccttctaat

SEQ ID NO: 3256 - DNA, 23 bp, synthetic construct
  source 1..23: mol_type = other DNA
tatctactcaatcttccttctaa

SEQ ID NO: 3257 - DNA, 23 bp, synthetic construct
  source 1..23: mol_type = other DNA
ctatctactcaatcttccttcta

SEQ ID NO: 3258 - DNA, 23 bp, synthetic construct
  source 1..23: mol_type = other DNA
cctatctactcaatcttccttct

SEQ ID NO: 3259 - DNA, 23 bp, synthetic construct
  source 1..23: mol_type = other DNA
acctatctactcaatcttccttc

SEQ ID NO: 3260 - DNA, 23 bp, synthetic construct
  source 1..23: mol_type = other DNA
cacctatctactcaatcttcctt

SEQ ID NO: 3261 - DNA, 23 bp, synthetic construct
  source 1..23: mol_type = other DNA
tcacctatctactcaatcttcct

SEQ ID NO: 3262 - DNA, 23 bp, synthetic construct
  source 1..23: mol_type = other DNA
ttcacctatctactcaatcttcc

SEQ ID NO: 3263 - DNA, 23 bp, synthetic construct
  source 1..23: mol_type = other DNA
attcacctatctactcaatcttc

SEQ ID NO: 3264 - DNA, 23 bp, synthetic construct
  source 1..23: mol_type = other DNA
aattcacctatctactcaatctt

SEQ ID NO: 3265 - DNA, 23 bp, synthetic construct
  source 1..23: mol_type = other DNA
aaattcacctatctactcaatct

SEQ ID NO: 3266 - DNA, 23 bp, synthetic construct
  source 1..23: mol_type = other DNA
caaattcacctatctactcaatc

SEQ ID NO: 3267 - DNA, 23 bp, synthetic construct
  source 1..23: mol_type = other DNA
acaaattcacctatctactcaat

SEQ ID NO: 3268 - DNA, 23 bp, synthetic construct
  source 1..23: mol_type = other DNA
aacaaattcacctatctactcaa

SEQ ID NO: 3269 - DNA, 23 bp, synthetic construct
  source 1..23: mol_type = other DNA
caacaaattcacctatctactca

SEQ ID NO: 3270 - DNA, 23 bp, synthetic construct
  source 1..23: mol_type = other DNA
tcaacaaattcacctatctactc

SEQ ID NO: 3271 - DNA, 23 bp, synthetic construct
  source 1..23: mol_type = other DNA
atcaacaaattcacctatctact

SEQ ID NO: 3272 - DNA, 23 bp, synthetic construct
  source 1..23: mol_type = other DNA
tatcaacaaattcacctatctac

SEQ ID NO: 3273 - DNA, 23 bp, synthetic construct
  source 1..23: mol_type = other DNA
ctatcaacaaattcacctatcta

SEQ ID NO: 3274 - DNA, 23 bp, synthetic construct
  source 1..23: mol_type = other DNA
actatcaacaaattcacctatct

SEQ ID NO: 3275 - DNA, 23 bp, synthetic construct
  source 1..23: mol_type = other DNA
gactatcaacaaattcacctatc

SEQ ID NO: 3276 - DNA, 23 bp, synthetic construct
  source 1..23: mol_type = other DNA
tgactatcaacaaattcacctat

SEQ ID NO: 3277 - DNA, 23 bp, synthetic construct
  source 1..23: mol_type = other DNA
ctgactatcaacaaattcaccta

SEQ ID NO: 3278 - DNA, 23 bp, synthetic construct
  source 1..23: mol_type = other DNA
tctgactatcaacaaattcacct

SEQ ID NO: 3279 - DNA, 23 bp, synthetic construct
  source 1..23: mol_type = other DNA
atctgactatcaacaaattcacc

SEQ ID NO: 3280 - DNA, 23 bp, synthetic construct
  source 1..23: mol_type = other DNA
catctgactatcaacaaattcac

SEQ ID NO: 3281 - DNA, 23 bp, synthetic construct
  source 1..23: mol_type = other DNA
ccatctgactatcaacaaattca

SEQ ID NO: 3282 - DNA, 23 bp, synthetic construct
  source 1..23: mol_type = other DNA
cccatctgactatcaacaaattc

SEQ ID NO: 3283 - DNA, 23 bp, synthetic construct
  source 1..23: mol_type = other DNA
acccatctgactatcaacaaatt

SEQ ID NO: 3284 - DNA, 23 bp, synthetic construct
  source 1..23: mol_type = other DNA
tacccatctgactatcaacaaat

SEQ ID NO: 3285 - DNA, 23 bp, synthetic construct
  source 1..23: mol_type = other DNA
ctacccatctgactatcaacaaa

SEQ ID NO: 3286 - DNA, 23 bp, synthetic construct
  source 1..23: mol_type = other DNA
tctacccatctgactatcaacaa

SEQ ID NO: 3287 - DNA, 23 bp, synthetic construct
  source 1..23: mol_type = other DNA
atctacccatctgactatcaaca

SEQ ID NO: 3288 - DNA, 23 bp, synthetic construct
  source 1..23: mol_type = other DNA
tatctacccatctgactatcaac

SEQ ID NO: 3289 - DNA, 23 bp, synthetic construct
  source 1..23: mol_type = other DNA
ctatctacccatctgactatcaa

SEQ ID NO: 3290 - DNA, 23 bp, synthetic construct
  source 1..23: mol_type = other DNA
cctatctacccatctgactatca

SEQ ID NO: 3291 - DNA, 23 bp, synthetic construct
  source 1..23: mol_type = other DNA
acctatctacccatctgactatc

SEQ ID NO: 3292 - DNA, 23 bp, synthetic construct
  source 1..23: mol_type = other DNA
tacctatctacccatctgactat

SEQ ID NO: 3293 - DNA, 23 bp, synthetic construct
  source 1..23: mol_type = other DNA
ctacctatctacccatctgacta

SEQ ID NO: 3294 - DNA, 23 bp, synthetic construct
  source 1..23: mol_type = other DNA
tctacctatctacccatctgact

SEQ ID NO: 3295 - DNA, 23 bp, synthetic construct
  source 1..23: mol_type = other DNA
atctacctatctacccatctgac

SEQ ID NO: 3296 - DNA, 23 bp, synthetic construct
  source 1..23: mol_type = other DNA
catctacctatctacccatctga

SEQ ID NO: 3297 - DNA, 23 bp, synthetic construct
  source 1..23: mol_type = other DNA
ccatctacctatctacccatctg

SEQ ID NO: 3298 - DNA, 23 bp, synthetic construct
  source 1..23: mol_type = other DNA
tccatctacctatctacccatct

SEQ ID NO: 3299 - DNA, 23 bp, synthetic construct
  source 1..23: mol_type = other DNA
atccatctacctatctacccatc

SEQ ID NO: 3300 - DNA, 23 bp, synthetic construct
  source 1..23: mol_type = other DNA
catccatctacctatctacccat

SEQ ID NO: 3301 - DNA, 23 bp, synthetic construct
  source 1..23: mol_type = other DNA
ccatccatctacctatctaccca

SEQ ID NO: 3302 - DNA, 23 bp, synthetic construct
  source 1..23: mol_type = other DNA
tccatccatctacctatctaccc

SEQ ID NO: 3303 - DNA, 23 bp, synthetic construct
  source 1..23: mol_type = other DNA
atccatccatctacctatctacc

SEQ ID NO: 3304 - DNA, 23 bp, synthetic construct
  source 1..23: mol_type = other DNA
catccatccatctacctatctac

SEQ ID NO: 3305 - DNA, 23 bp, synthetic construct
  source 1..23: mol_type = other DNA
ccatccatccatctacctatcta

SEQ ID NO: 3306 - DNA, 23 bp, synthetic construct
  source 1..23: mol_type = other DNA
tccatccatccatctacctatct

SEQ ID NO: 3307 - DNA, 23 bp, synthetic construct
  source 1..23: mol_type = other DNA
atccatccatccatctacctatc

SEQ ID NO: 3308 - DNA, 23 bp, synthetic construct
  source 1..23: mol_type = other DNA
catccatccatccatctacctat

SEQ ID NO: 3309 - DNA, 23 bp, synthetic construct
  source 1..23: mol_type = other DNA
ccatccatccatccatctaccta

SEQ ID NO: 3310 - DNA, 23 bp, synthetic construct
  source 1..23: mol_type = other DNA
tccatccatccatccatctacct

SEQ ID NO: 3311 - DNA, 23 bp, synthetic construct
  source 1..23: mol_type = other DNA
atccatccatccatccatctacc

SEQ ID NO: 3312 - DNA, 23 bp, synthetic construct
  source 1..23: mol_type = other DNA
catccatccatccatccatctac

SEQ ID NO: 3313 - DNA, 23 bp, synthetic construct
  source 1..23: mol_type = other DNA
ccatccatccatccatccatcta

SEQ ID NO: 3314 - DNA, 23 bp, synthetic construct
  source 1..23: mol_type = other DNA
tccatccatccatccatccatct

SEQ ID NO: 3315 - DNA, 23 bp, synthetic construct
  source 1..23: mol_type = other DNA
atccatccatccatccatccatc

SEQ ID NO: 3316 - DNA, 23 bp, synthetic construct
  source 1..23: mol_type = other DNA
catccatccatccatccatccat

SEQ ID NO: 3317 - DNA, 23 bp, synthetic construct
  source 1..23: mol_type = other DNA
acatccatccatccatccatcca

SEQ ID NO: 3318 - DNA, 23 bp, synthetic construct
  source 1..23: mol_type = other DNA
tacatccatccatccatccatcc

SEQ ID NO: 3319 - DNA, 23 bp, synthetic construct
  source 1..23: mol_type = other DNA
atacatccatccatccatccatc

SEQ ID NO: 3320 - DNA, 23 bp, synthetic construct
  source 1..23: mol_type = other DNA
tatacatccatccatccatccat

SEQ ID NO: 3321 - DNA, 23 bp, synthetic construct
  source 1..23: mol_type = other DNA
ctatacatccatccatccatcca

SEQ ID NO: 3322 - DNA, 23 bp, synthetic construct
  source 1..23: mol_type = other DNA
cctatacatccatccatccatcc

SEQ ID NO: 3323 - DNA, 23 bp, synthetic construct
  source 1..23: mol_type = other DNA
gcctatacatccatccatccatc

SEQ ID NO: 3324 - DNA, 23 bp, synthetic construct
  source 1..23: mol_type = other DNA
tgcctatacatccatccatccat

SEQ ID NO: 3325 - DNA, 23 bp, synthetic construct
  source 1..23: mol_type = other DNA
ctgcctatacatccatccatcca

SEQ ID NO: 3326 - DNA, 23 bp, synthetic construct
  source 1..23: mol_type = other DNA
tctgcctatacatccatccatcc

SEQ ID NO: 3327 - DNA, 23 bp, synthetic construct
  source 1..23: mol_type = other DNA
atctgcctatacatccatccatc

SEQ ID NO: 3328 - DNA, 23 bp, synthetic construct
  source 1..23: mol_type = other DNA
catctgcctatacatccatccat

SEQ ID NO: 3329 - DNA, 23 bp, synthetic construct
  source 1..23: mol_type = other DNA
ccatctgcctatacatccatcca

SEQ ID NO: 3330 - DNA, 23 bp, synthetic construct
  source 1..23: mol_type = other DNA
tccatctgcctatacatccatcc

SEQ ID NO: 3331 - DNA, 23 bp, synthetic construct
  source 1..23: mol_type = other DNA
gtccatctgcctatacatccatc

SEQ ID NO: 3332 - DNA, 23 bp, synthetic construct
  source 1..23: mol_type = other DNA
tgtccatctgcctatacatccat

SEQ ID NO: 3333 - DNA, 23 bp, synthetic construct
  source 1..23: mol_type = other DNA
ttgtccatctgcctatacatcca

SEQ ID NO: 3334 - DNA, 23 bp, synthetic construct
  source 1..23: mol_type = other DNA
tttgtccatctgcctatacatcc

SEQ ID NO: 3335 - DNA, 23 bp, synthetic construct
  source 1..23: mol_type = other DNA
atttgtccatctgcctatacatc

SEQ ID NO: 3336 - DNA, 23 bp, synthetic construct
  source 1..23: mol_type = other DNA
catttgtccatctgcctatacat

SEQ ID NO: 3337 - DNA, 23 bp, synthetic construct
  source 1..23: mol_type = other DNA
ccatttgtccatctgcctataca

SEQ ID NO: 3338 - DNA, 23 bp, synthetic construct
  source 1..23: mol_type = other DNA
tccatttgtccatctgcctatac

SEQ ID NO: 3339 - DNA, 23 bp, synthetic construct
  source 1..23: mol_type = other DNA
atccatttgtccatctgcctata

SEQ ID NO: 3340 - DNA, 23 bp, synthetic construct
  source 1..23: mol_type = other DNA
catccatttgtccatctgcctat

SEQ ID NO: 3341 - DNA, 23 bp, synthetic construct
  source 1..23: mol_type = other DNA
tcatccatttgtccatctgccta

SEQ ID NO: 3342 - DNA, 23 bp, synthetic construct
  source 1..23: mol_type = other DNA
ttcatccatttgtccatctgcct

SEQ ID NO: 3343 - DNA, 23 bp, synthetic construct
  source 1..23: mol_type = other DNA
attcatccatttgtccatctgcc

SEQ ID NO: 3344 - DNA, 23 bp, synthetic construct
  source 1..23: mol_type = other DNA
cattcatccatttgtccatctgc

SEQ ID NO: 3345 - DNA, 23 bp, synthetic construct
  source 1..23: mol_type = other DNA
ccattcatccatttgtccatctg

SEQ ID NO: 3346 - DNA, 23 bp, synthetic construct
  source 1..23: mol_type = other DNA
cccattcatccatttgtccatct

SEQ ID NO: 3347 - DNA, 23 bp, synthetic construct
  source 1..23: mol_type = other DNA
acccattcatccatttgtccatc

SEQ ID NO: 3348 - DNA, 23 bp, synthetic construct
  source 1..23: mol_type = other DNA
cacccattcatccatttgtccat

SEQ ID NO: 3349 - DNA, 23 bp, synthetic construct
  source 1..23: mol_type = other DNA
ccacccattcatccatttgtcca

SEQ ID NO: 3350 - DNA, 23 bp, synthetic construct
  source 1..23: mol_type = other DNA
cccacccattcatccatttgtcc

SEQ ID NO: 3351 - DNA, 23 bp, synthetic construct
  source 1..23: mol_type = other DNA
acccacccattcatccatttgtc

SEQ ID NO: 3352 - DNA, 23 bp, synthetic construct
  source 1..23: mol_type = other DNA
cacccacccattcatccatttgt

SEQ ID NO: 3353 - DNA, 23 bp, synthetic construct
  source 1..23: mol_type = other DNA
ccacccacccattcatccatttg

SEQ ID NO: 3354 - DNA, 23 bp, synthetic construct
  source 1..23: mol_type = other DNA
tccacccacccattcatccattt

SEQ ID NO: 3355 - DNA, 23 bp, synthetic construct
  source 1..23: mol_type = other DNA
atccacccacccattcatccatt

SEQ ID NO: 3356 - DNA, 23 bp, synthetic construct
  source 1..23: mol_type = other DNA
catccacccacccattcatccat

SEQ ID NO: 3357 - DNA, 23 bp, synthetic construct
  source 1..23: mol_type = other DNA
tcatccacccacccattcatcca

SEQ ID NO: 3358 - DNA, 23 bp, synthetic construct
  source 1..23: mol_type = other DNA
ttcatccacccacccattcatcc

SEQ ID NO: 3359 - DNA, 23 bp, synthetic construct
  source 1..23: mol_type = other DNA
attcatccacccacccattcatc

SEQ ID NO: 3360 - DNA, 23 bp, synthetic construct
  source 1..23: mol_type = other DNA
cattcatccacccacccattcat

SEQ ID NO: 3361 - DNA, 23 bp, synthetic construct
  source 1..23: mol_type = other DNA
ccattcatccacccacccattca

SEQ ID NO: 3362 - DNA, 23 bp, synthetic construct
  source 1..23: mol_type = other DNA
tccattcatccacccacccattc

SEQ ID NO: 3363 - DNA, 23 bp, synthetic construct
  source 1..23: mol_type = other DNA
ttccattcatccacccacccatt

SEQ ID NO: 3364 - DNA, 23 bp, synthetic construct
  source 1..23: mol_type = other DNA
cttccattcatccacccacccat

SEQ ID NO: 3365 - DNA, 23 bp, synthetic construct
  source 1..23: mol_type = other DNA
ccttccattcatccacccaccca

SEQ ID NO: 3366 - DNA, 23 bp, synthetic construct
  source 1..23: mol_type = other DNA
tccttccattcatccacccaccc

SEQ ID NO: 3367 - DNA, 23 bp, synthetic construct
  source 1..23: mol_type = other DNA
atccttccattcatccacccacc

SEQ ID NO: 3368 - DNA, 23 bp, synthetic construct
  source 1..23: mol_type = other DNA
catccttccattcatccacccac

SEQ ID NO: 3369 - DNA, 23 bp, synthetic construct
  source 1..23: mol_type = other DNA
acatccttccattcatccaccca

SEQ ID NO: 3370 - DNA, 23 bp, synthetic construct
  source 1..23: mol_type = other DNA
cacatccttccattcatccaccc

SEQ ID NO: 3371 - DNA, 23 bp, synthetic construct
  source 1..23: mol_type = other DNA
acacatccttccattcatccacc

SEQ ID NO: 3372 - DNA, 23 bp, synthetic construct
  source 1..23: mol_type = other DNA
cacacatccttccattcatccac

SEQ ID NO: 3373 - DNA, 23 bp, synthetic construct
  source 1..23: mol_type = other DNA
ccacacatccttccattcatcca

SEQ ID NO: 3374 - DNA, 23 bp, synthetic construct
  source 1..23: mol_type = other DNA
accacacatccttccattcatcc

SEQ ID NO: 3375 - DNA, 23 bp, synthetic construct
  source 1..23: mol_type = other DNA
aaccacacatccttccattcatc

SEQ ID NO: 3376 - DNA, 23 bp, synthetic construct
  source 1..23: mol_type = other DNA
caaccacacatccttccattcat

SEQ ID NO: 3377 - DNA, 23 bp, synthetic construct
  source 1..23: mol_type = other DNA
tcaaccacacatccttccattca

SEQ ID NO: 3378 - DNA, 23 bp, synthetic construct
  source 1..23: mol_type = other DNA
ttcaaccacacatccttccattc

SEQ ID NO: 3379 - DNA, 23 bp, synthetic construct
  source 1..23: mol_type = other DNA
gttcaaccacacatccttccatt

SEQ ID NO: 3380 - DNA, 23 bp, synthetic construct
  source 1..23: mol_type = other DNA
agttcaaccacacatccttccat

SEQ ID NO: 3381 - DNA, 23 bp, synthetic construct
  source 1..23: mol_type = other DNA
tagttcaaccacacatccttcca

SEQ ID NO: 3382 - DNA, 23 bp, synthetic construct
  source 1..23: mol_type = other DNA
atagttcaaccacacatccttcc

SEQ ID NO: 3383 - DNA, 23 bp, synthetic construct
  source 1..23: mol_type = other DNA
aatagttcaaccacacatccttc

SEQ ID NO: 3384 - DNA, 23 bp, synthetic construct
  source 1..23: mol_type = other DNA
caatagttcaaccacacatcctt

SEQ ID NO: 3385 - DNA, 23 bp, synthetic construct
  source 1..23: mol_type = other DNA
gcaatagttcaaccacacatcct

SEQ ID NO: 3386 - DNA, 23 bp, synthetic construct
  source 1..23: mol_type = other DNA
tgcaatagttcaaccacacatcc

SEQ ID NO: 3387 - DNA, 23 bp, synthetic construct
  source 1..23: mol_type = other DNA
ttgcaatagttcaaccacacatc

SEQ ID NO: 3388 - DNA, 23 bp, synthetic construct
  source 1..23: mol_type = other DNA
cttgcaatagttcaaccacacat

SEQ ID NO: 3389 - DNA, 23 bp, synthetic construct
  source 1..23: mol_type = other DNA
acttgcaatagttcaaccacaca

SEQ ID NO: 3390 - DNA, 23 bp, synthetic construct
  source 1..23: mol_type = other DNA
tacttgcaatagttcaaccacac

SEQ ID NO: 3391 - DNA, 23 bp, synthetic construct
  source 1..23: mol_type = other DNA
atacttgcaatagttcaaccaca

SEQ ID NO: 3392 - DNA, 23 bp, synthetic construct
  source 1..23: mol_type = other DNA
aatacttgcaatagttcaaccac

SEQ ID NO: 3393 - DNA, 23 bp, synthetic construct
  source 1..23: mol_type = other DNA
caatacttgcaatagttcaacca

SEQ ID NO: 3394 - DNA, 23 bp, synthetic construct
  source 1..23: mol_type = other DNA
tcaatacttgcaatagttcaacc

SEQ ID NO: 3395 - DNA, 23 bp, synthetic construct
  source 1..23: mol_type = other DNA
atcaatacttgcaatagttcaac

SEQ ID NO: 3396 - DNA, 23 bp, synthetic construct
  source 1..23: mol_type = other DNA
tatcaatacttgcaatagttcaa

SEQ ID NO: 3397 - DNA, 23 bp, synthetic construct
  source 1..23: mol_type = other DNA
ttatcaatacttgcaatagttca

SEQ ID NO: 3398 - DNA, 23 bp, synthetic construct
  source 1..23: mol_type = other DNA
attatcaatacttgcaatagttc

SEQ ID NO: 3399 - DNA, 23 bp, synthetic construct
  source 1..23: mol_type = other DNA
aattatcaatacttgcaatagtt

SEQ ID NO: 3400 - DNA, 23 bp, synthetic construct
  source 1..23: mol_type = other DNA
caattatcaatacttgcaatagt

SEQ ID NO: 3401 - DNA, 23 bp, synthetic construct
  source 1..23: mol_type = other DNA
ccaattatcaatacttgcaatag

SEQ ID NO: 3402 - DNA, 23 bp, synthetic construct
  source 1..23: mol_type = other DNA
cccaattatcaatacttgcaata

SEQ ID NO: 3403 - DNA, 23 bp, synthetic construct
  source 1..23: mol_type = other DNA
acccaattatcaatacttgcaat

SEQ ID NO: 3404 - DNA, 23 bp, synthetic construct
  source 1..23: mol_type = other DNA
aacccaattatcaatacttgcaa

SEQ ID NO: 3405 - DNA, 23 bp, synthetic construct
  source 1..23: mol_type = other DNA
gaacccaattatcaatacttgca

SEQ ID NO: 3406 - DNA, 23 bp, synthetic construct
  source 1..23: mol_type = other DNA
tgaacccaattatcaatacttgc

SEQ ID NO: 3407 - DNA, 23 bp, synthetic construct
  source 1..23: mol_type = other DNA
atgaacccaattatcaatacttg

SEQ ID NO: 3408 - DNA, 23 bp, synthetic construct
  source 1..23: mol_type = other DNA
tatgaacccaattatcaatactt

SEQ ID NO: 3409 - DNA, 23 bp, synthetic construct
  source 1..23: mol_type = other DNA
ttatgaacccaattatcaatact

SEQ ID NO: 3410 - DNA, 23 bp, synthetic construct
  source 1..23: mol_type = other DNA
attatgaacccaattatcaatac

SEQ ID NO: 3411 - DNA, 23 bp, synthetic construct
  source 1..23: mol_type = other DNA
aattatgaacccaattatcaata

SEQ ID NO: 3412 - DNA, 23 bp, synthetic construct
  source 1..23: mol_type = other DNA
aaattatgaacccaattatcaat

SEQ ID NO: 3413 - DNA, 23 bp, synthetic construct
  source 1..23: mol_type = other DNA
gaaattatgaacccaattatcaa

SEQ ID NO: 3414 - DNA, 23 bp, synthetic construct
  source 1..23: mol_type = other DNA
agaaattatgaacccaattatca

SEQ ID NO: 3415 - DNA, 23 bp, synthetic construct
  source 1..23: mol_type = other DNA
cagaaattatgaacccaattatc

SEQ ID NO: 3416 - DNA, 23 bp, synthetic construct
  source 1..23: mol_type = other DNA
tcagaaattatgaacccaattat

SEQ ID NO: 3417 - DNA, 23 bp, synthetic construct
  source 1..23: mol_type = other DNA
ttcagaaattatgaacccaatta

SEQ ID NO: 3418 - DNA, 23 bp, synthetic construct
  source 1..23: mol_type = other DNA
attcagaaattatgaacccaatt

SEQ ID NO: 3419 - DNA, 23 bp, synthetic construct
  source 1..23: mol_type = other DNA
tattcagaaattatgaacccaat

SEQ ID NO: 3420 - DNA, 23 bp, synthetic construct
  source 1..23: mol_type = other DNA
atattcagaaattatgaacccaa

SEQ ID NO: 3421 - DNA, 23 bp, synthetic construct
  source 1..23: mol_type = other DNA
aatattcagaaattatgaaccca

SEQ ID NO: 3422 - DNA, 23 bp, synthetic construct
  source 1..23: mol_type = other DNA
aaatattcagaaattatgaaccc

SEQ ID NO: 3423 - DNA, 23 bp, synthetic construct
  source 1..23: mol_type = other DNA
taaatattcagaaattatgaacc

SEQ ID NO: 3424 - DNA, 23 bp, synthetic construct
  source 1..23: mol_type = other DNA
ctaaatattcagaaattatgaac

SEQ ID NO: 3425 - DNA, 23 bp, synthetic construct
  source 1..23: mol_type = other DNA
tctaaatattcagaaattatgaa

SEQ ID NO: 3426 - DNA, 23 bp, synthetic construct
  source 1..23: mol_type = other DNA
atctaaatattcagaaattatga

SEQ ID NO: 3427 - DNA, 23 bp, synthetic construct
  source 1..23: mol_type = other DNA
catctaaatattcagaaattatg

SEQ ID NO: 3428 - DNA, 23 bp, synthetic construct
  source 1..23: mol_type = other DNA
ccatctaaatattcagaaattat

SEQ ID NO: 3429 - DNA, 23 bp, synthetic construct
  source 1..23: mol_type = other DNA
tccatctaaatattcagaaatta

SEQ ID NO: 3430 - DNA, 23 bp, synthetic construct
  source 1..23: mol_type = other DNA
atccatctaaatattcagaaatt

SEQ ID NO: 3431 - DNA, 23 bp, synthetic construct
  source 1..23: mol_type = other DNA
catccatctaaatattcagaaat

SEQ ID NO: 3432 - DNA, 23 bp, synthetic construct
  source 1..23: mol_type = other DNA
ccatccatctaaatattcagaaa

SEQ ID NO: 3433 - DNA, 23 bp, synthetic construct
  source 1..23: mol_type = other DNA
accatccatctaaatattcagaa

SEQ ID NO: 3434 - DNA, 23 bp, synthetic construct
  source 1..23: mol_type = other DNA
aaccatccatctaaatattcaga

SEQ ID NO: 3435 - DNA, 23 bp, synthetic construct
  source 1..23: mol_type = other DNA
caaccatccatctaaatattcag

SEQ ID NO: 3436 - DNA, 23 bp, synthetic construct
  source 1..23: mol_type = other DNA
acaaccatccatctaaatattca

SEQ ID NO: 3437 - DNA, 23 bp, synthetic construct
  source 1..23: mol_type = other DNA
cacaaccatccatctaaatattc

SEQ ID NO: 3438 - DNA, 23 bp, synthetic construct
  source 1..23: mol_type = other DNA
tcacaaccatccatctaaatatt

SEQ ID NO: 3439 - DNA, 23 bp, synthetic construct
  source 1..23: mol_type = other DNA
ctcacaaccatccatctaaatat

SEQ ID NO: 3440 - DNA, 23 bp, synthetic construct
  source 1..23: mol_type = other DNA
actcacaaccatccatctaaata

SEQ ID NO: 3441 - DNA, 23 bp, synthetic construct
  source 1..23: mol_type = other DNA
cactcacaaccatccatctaaat

SEQ ID NO: 3442 - DNA, 23 bp, synthetic construct
  source 1..23: mol_type = other DNA
ccactcacaaccatccatctaaa

SEQ ID NO: 3443 - DNA, 23 bp, synthetic construct
  source 1..23: mol_type = other DNA
gccactcacaaccatccatctaa

SEQ ID NO: 3444 - DNA, 23 bp, synthetic construct
  source 1..23: mol_type = other DNA
agccactcacaaccatccatcta

SEQ ID NO: 3445 - DNA, 23 bp, synthetic construct
  source 1..23: mol_type = other DNA
cagccactcacaaccatccatct

SEQ ID NO: 3446 - DNA, 23 bp, synthetic construct
  source 1..23: mol_type = other DNA
ccagccactcacaaccatccatc

SEQ ID NO: 3447 - DNA, 23 bp, synthetic construct
  source 1..23: mol_type = other DNA
accagccactcacaaccatccat

SEQ ID NO: 3448 - DNA, 23 bp, synthetic construct
  source 1..23: mol_type = other DNA
caccagccactcacaaccatcca

SEQ ID NO: 3449 - DNA, 23 bp, synthetic construct
  source 1..23: mol_type = other DNA
ccaccagccactcacaaccatcc

SEQ ID NO: 3450 - DNA, 23 bp, synthetic construct
  source 1..23: mol_type = other DNA
tccaccagccactcacaaccatc

SEQ ID NO: 3451 - DNA, 23 bp, synthetic construct
  source 1..23: mol_type = other DNA
gtccaccagccactcacaaccat

SEQ ID NO: 3452 - DNA, 23 bp, synthetic construct
  source 1..23: mol_type = other DNA
tgtccaccagccactcacaacca

SEQ ID NO: 3453 - DNA, 23 bp, synthetic construct
  source 1..23: mol_type = other DNA
ctgtccaccagccactcacaacc

SEQ ID NO: 3454 - DNA, 23 bp, synthetic construct
  source 1..23: mol_type = other DNA
tctgtccaccagccactcacaac

SEQ ID NO: 3455 - DNA, 23 bp, synthetic construct
  source 1..23: mol_type = other DNA
gtctgtccaccagccactcacaa

SEQ ID NO: 3456 - DNA, 23 bp, synthetic construct
  source 1..23: mol_type = other DNA
cgtctgtccaccagccactcaca

SEQ ID NO: 3457 - DNA, 23 bp, synthetic construct
  source 1..23: mol_type = other DNA
tcgtctgtccaccagccactcac

SEQ ID NO: 3458 - DNA, 23 bp, synthetic construct
  source 1..23: mol_type = other DNA
ttcgtctgtccaccagccactca

SEQ ID NO: 3459 - DNA, 23 bp, synthetic construct
  source 1..23: mol_type = other DNA
tttcgtctgtccaccagccactc

SEQ ID NO: 3460 - DNA, 23 bp, synthetic construct
  source 1..23: mol_type = other DNA
ttttcgtctgtccaccagccact

SEQ ID NO: 3461 - DNA, 23 bp, synthetic construct
  source 1..23: mol_type = other DNA
tttttcgtctgtccaccagccac

SEQ ID NO: 3462 - DNA, 23 bp, synthetic construct
  source 1..23: mol_type = other DNA
atttttcgtctgtccaccagcca

SEQ ID NO: 3463 - DNA, 23 bp, synthetic construct
  source 1..23: mol_type = other DNA
catttttcgtctgtccaccagcc

SEQ ID NO: 3464 - DNA, 23 bp, synthetic construct
  source 1..23: mol_type = other DNA
ccatttttcgtctgtccaccagc

SEQ ID NO: 3465 - DNA, 23 bp, synthetic construct
  source 1..23: mol_type = other DNA
tccatttttcgtctgtccaccag

SEQ ID NO: 3466 - DNA, 23 bp, synthetic construct
  source 1..23: mol_type = other DNA
atccatttttcgtctgtccacca

SEQ ID NO: 3467 - DNA, 23 bp, synthetic construct
  source 1..23: mol_type = other DNA
catccatttttcgtctgtccacc

SEQ ID NO: 3468 - DNA, 23 bp, synthetic construct
  source 1..23: mol_type = other DNA
ccatccatttttcgtctgtccac

SEQ ID NO: 3469 - DNA, 23 bp, synthetic construct
  source 1..23: mol_type = other DNA
accatccatttttcgtctgtcca

SEQ ID NO: 3470 - DNA, 23 bp, synthetic construct
  source 1..23: mol_type = other DNA
aaccatccatttttcgtctgtcc

SEQ ID NO: 3471 - DNA, 23 bp, synthetic construct
  source 1..23: mol_type = other DNA
caaccatccatttttcgtctgtc

SEQ ID NO: 3472 - DNA, 23 bp, synthetic construct
  source 1..23: mol_type = other DNA
ccaaccatccatttttcgtctgt

SEQ ID NO: 3473 - DNA, 23 bp, synthetic construct
  source 1..23: mol_type = other DNA
tccaaccatccatttttcgtctg

SEQ ID NO: 3474 - DNA, 23 bp, synthetic construct
  source 1..23: mol_type = other DNA
atccaaccatccatttttcgtct

SEQ ID NO: 3475 - DNA, 23 bp, synthetic construct
  source 1..23: mol_type = other DNA
tatccaaccatccatttttcgtc

SEQ ID NO: 3476 - DNA, 23 bp, synthetic construct
  source 1..23: mol_type = other DNA
ttatccaaccatccatttttcgt

SEQ ID NO: 3477 - DNA, 23 bp, synthetic construct
  source 1..23: mol_type = other DNA
tttatccaaccatccatttttcg

SEQ ID NO: 3478 - DNA, 23 bp, synthetic construct
  source 1..23: mol_type = other DNA
atttatccaaccatccatttttc

SEQ ID NO: 3479 - DNA, 23 bp, synthetic construct
  source 1..23: mol_type = other DNA
aatttatccaaccatccattttt

SEQ ID NO: 3480 - DNA, 23 bp, synthetic construct
  source 1..23: mol_type = other DNA
caatttatccaaccatccatttt

SEQ ID NO: 3481 - DNA, 23 bp, synthetic construct
  source 1..23: mol_type = other DNA
tcaatttatccaaccatccattt

SEQ ID NO: 3482 - DNA, 23 bp, synthetic construct
  source 1..23: mol_type = other DNA
atcaatttatccaaccatccatt

SEQ ID NO: 3483 - DNA, 23 bp, synthetic construct
  source 1..23: mol_type = other DNA
catcaatttatccaaccatccat

SEQ ID NO: 3484 - DNA, 23 bp, synthetic construct
  source 1..23: mol_type = other DNA
ccatcaatttatccaaccatcca

SEQ ID NO: 3485 - DNA, 23 bp, synthetic construct
  source 1..23: mol_type = other DNA
cccatcaatttatccaaccatcc

SEQ ID NO: 3486 - DNA, 23 bp, synthetic construct
  source 1..23: mol_type = other DNA
acccatcaatttatccaaccatc

SEQ ID NO: 3487 - DNA, 23 bp, synthetic construct
  source 1..23: mol_type = other DNA
cacccatcaatttatccaaccat

SEQ ID NO: 3488 - DNA, 23 bp, synthetic construct
  source 1..23: mol_type = other DNA
ccacccatcaatttatccaacca

SEQ ID NO: 3489 - DNA, 23 bp, synthetic construct
  source 1..23: mol_type = other DNA
tccacccatcaatttatccaacc

SEQ ID NO: 3490 - DNA, 23 bp, synthetic construct
  source 1..23: mol_type = other DNA
atccacccatcaatttatccaac

SEQ ID NO: 3491 - DNA, 23 bp, synthetic construct
  source 1..23: mol_type = other DNA
catccacccatcaatttatccaa

SEQ ID NO: 3492 - DNA, 23 bp, synthetic construct
  source 1..23: mol_type = other DNA
ccatccacccatcaatttatcca

SEQ ID NO: 3493 - DNA, 23 bp, synthetic construct
  source 1..23: mol_type = other DNA
tccatccacccatcaatttatcc

SEQ ID NO: 3494 - DNA, 23 bp, synthetic construct
  source 1..23: mol_type = other DNA
atccatccacccatcaatttatc

SEQ ID NO: 3495 - DNA, 23 bp, synthetic construct
  source 1..23: mol_type = other DNA
catccatccacccatcaatttat

SEQ ID NO: 3496 - DNA, 23 bp, synthetic construct
  source 1..23: mol_type = other DNA
ccatccatccacccatcaattta

SEQ ID NO: 3497 - DNA, 23 bp, synthetic construct
  source 1..23: mol_type = other DNA
accatccatccacccatcaattt

SEQ ID NO: 3498 - DNA, 23 bp, synthetic construct
  source 1..23: mol_type = other DNA
aaccatccatccacccatcaatt

SEQ ID NO: 3499 - DNA, 23 bp, synthetic construct
  source 1..23: mol_type = other DNA
caaccatccatccacccatcaat

SEQ ID NO: 3500 - DNA, 23 bp, synthetic construct
  source 1..23: mol_type = other DNA
ccaaccatccatccacccatcaa

SEQ ID NO: 3501 - DNA, 23 bp, synthetic construct
  source 1..23: mol_type = other DNA
accaaccatccatccacccatca

SEQ ID NO: 3502 - DNA, 23 bp, synthetic construct
  source 1..23: mol_type = other DNA
aaccaaccatccatccacccatc

SEQ ID NO: 3503 - DNA, 23 bp, synthetic construct
  source 1..23: mol_type = other DNA
caaccaaccatccatccacccat

SEQ ID NO: 3504 - DNA, 23 bp, synthetic construct
  source 1..23: mol_type = other DNA
acaaccaaccatccatccaccca

SEQ ID NO: 3505 - DNA, 23 bp, synthetic construct
  source 1..23: mol_type = other DNA
tacaaccaaccatccatccaccc

SEQ ID NO: 3506 - DNA, 23 bp, synthetic construct
  source 1..23: mol_type = other DNA
atacaaccaaccatccatccacc

SEQ ID NO: 3507 - DNA, 23 bp, synthetic construct
  source 1..23: mol_type = other DNA
catacaaccaaccatccatccac

SEQ ID NO: 3508 - DNA, 23 bp, synthetic construct
  source 1..23: mol_type = other DNA
tcatacaaccaaccatccatcca

SEQ ID NO: 3509 - DNA, 23 bp, synthetic construct
  source 1..23: mol_type = other DNA
ttcatacaaccaaccatccatcc

SEQ ID NO: 3510 - DNA, 23 bp, synthetic construct
  source 1..23: mol_type = other DNA
tttcatacaaccaaccatccatc

SEQ ID NO: 3511 - DNA, 23 bp, synthetic construct
  source 1..23: mol_type = other DNA
ctttcatacaaccaaccatccat

SEQ ID NO: 3512 - DNA, 23 bp, synthetic construct
  source 1..23: mol_type = other DNA
tctttcatacaaccaaccatcca

SEQ ID NO: 3513 - DNA, 23 bp, synthetic construct
  source 1..23: mol_type = other DNA
ttctttcatacaaccaaccatcc

SEQ ID NO: 3514 - DNA, 23 bp, synthetic construct
  source 1..23: mol_type = other DNA
attctttcatacaaccaaccatc

SEQ ID NO: 3515 - DNA, 23 bp, synthetic construct
  source 1..23: mol_type = other DNA
cattctttcatacaaccaaccat

SEQ ID NO: 3516 - DNA, 23 bp, synthetic construct
  source 1..23: mol_type = other DNA
tcattctttcatacaaccaacca

SEQ ID NO: 3517 - DNA, 23 bp, synthetic construct
  source 1..23: mol_type = other DNA
ttcattctttcatacaaccaacc

SEQ ID NO: 3518 - DNA, 23 bp, synthetic construct
  source 1..23: mol_type = other DNA
attcattctttcatacaaccaac

SEQ ID NO: 3519 - DNA, 23 bp, synthetic construct
  source 1..23: mol_type = other DNA
cattcattctttcatacaaccaa

SEQ ID NO: 3520 - DNA, 23 bp, synthetic construct
  source 1..23: mol_type = other DNA
tcattcattctttcatacaacca

SEQ ID NO: 3521 - DNA, 23 bp, synthetic construct
  source 1..23: mol_type = other DNA
atcattcattctttcatacaacc

SEQ ID NO: 3522 - DNA, 23 bp, synthetic construct
  source 1..23: mol_type = other DNA
aatcattcattctttcatacaac

SEQ ID NO: 3523 - DNA, 23 bp, synthetic construct
  source 1..23: mol_type = other DNA
caatcattcattctttcatacaa

SEQ ID NO: 3524 - DNA, 23 bp, synthetic construct
  source 1..23: mol_type = other DNA
ccaatcattcattctttcataca

SEQ ID NO: 3525 - DNA, 23 bp, synthetic construct
  source 1..23: mol_type = other DNA
cccaatcattcattctttcatac

SEQ ID NO: 3526 - DNA, 23 bp, synthetic construct
  source 1..23: mol_type = other DNA
acccaatcattcattctttcata

SEQ ID NO: 3527 - DNA, 23 bp, synthetic construct
  source 1..23: mol_type = other DNA
tacccaatcattcattctttcat

SEQ ID NO: 3528 - DNA, 23 bp, synthetic construct
  source 1..23: mol_type = other DNA
ctacccaatcattcattctttca

SEQ ID NO: 3529 - DNA, 23 bp, synthetic construct
  source 1..23: mol_type = other DNA
cctacccaatcattcattctttc

SEQ ID NO: 3530 - DNA, 23 bp, synthetic construct
  source 1..23: mol_type = other DNA
acctacccaatcattcattcttt

SEQ ID NO: 3531 - DNA, 23 bp, synthetic construct
  source 1..23: mol_type = other DNA
cacctacccaatcattcattctt

SEQ ID NO: 3532 - DNA, 23 bp, synthetic construct
  source 1..23: mol_type = other DNA
ccacctacccaatcattcattct

SEQ ID NO: 3533 - DNA, 23 bp, synthetic construct
  source 1..23: mol_type = other DNA
tccacctacccaatcattcattc

SEQ ID NO: 3534 - DNA, 23 bp, synthetic construct
  source 1..23: mol_type = other DNA
atccacctacccaatcattcatt

SEQ ID NO: 3535 - DNA, 23 bp, synthetic construct
  source 1..23: mol_type = other DNA
aatccacctacccaatcattcat

SEQ ID NO: 3536 - DNA, 23 bp, synthetic construct
  source 1..23: mol_type = other DNA
taatccacctacccaatcattca

SEQ ID NO: 3537 - DNA, 23 bp, synthetic construct
  source 1..23: mol_type = other DNA
ttaatccacctacccaatcattc

SEQ ID NO: 3538 - DNA, 23 bp, synthetic construct
  source 1..23: mol_type = other DNA
cttaatccacctacccaatcatt

SEQ ID NO: 3539 - DNA, 23 bp, synthetic construct
  source 1..23: mol_type = other DNA
acttaatccacctacccaatcat

SEQ ID NO: 3540 - DNA, 23 bp, synthetic construct
  source 1..23: mol_type = other DNA
aacttaatccacctacccaatca

SEQ ID NO: 3541 - DNA, 23 bp, synthetic construct
  source 1..23: mol_type = other DNA
caacttaatccacctacccaatc

SEQ ID NO: 3542 - DNA, 23 bp, synthetic construct
  source 1..23: mol_type = other DNA
gcaacttaatccacctacccaat

SEQ ID NO: 3543 - DNA, 23 bp, synthetic construct
  source 1..23: mol_type = other DNA
cgcaacttaatccacctacccaa

SEQ ID NO: 3544 - DNA, 23 bp, synthetic construct
  source 1..23: mol_type = other DNA
ccgcaacttaatccacctaccca

SEQ ID NO: 3545 - DNA, 23 bp, synthetic construct
  source 1..23: mol_type = other DNA
tccgcaacttaatccacctaccc

SEQ ID NO: 3546 - DNA, 23 bp, synthetic construct
  source 1..23: mol_type = other DNA
atccgcaacttaatccacctacc

SEQ ID NO: 3547 - DNA, 23 bp, synthetic construct
  source 1..23: mol_type = other DNA
gatccgcaacttaatccacctac

SEQ ID NO: 3548 - DNA, 23 bp, synthetic construct
  source 1..23: mol_type = other DNA
tgatccgcaacttaatccaccta

SEQ ID NO: 3549 - DNA, 23 bp, synthetic construct
  source 1..23: mol_type = other DNA
ttgatccgcaacttaatccacct

SEQ ID NO: 3550 - DNA, 23 bp, synthetic construct
  source 1..23: mol_type = other DNA
attgatccgcaacttaatccacc

SEQ ID NO: 3551 - DNA, 23 bp, synthetic construct
  source 1..23: mol_type = other DNA
cattgatccgcaacttaatccac

SEQ ID NO: 3552 - DNA, 23 bp, synthetic construct
  source 1..23: mol_type = other DNA
acattgatccgcaacttaatcca

SEQ ID NO: 3553 - DNA, 23 bp, synthetic construct
  source 1..23: mol_type = other DNA
tacattgatccgcaacttaatcc

SEQ ID NO: 3554 - DNA, 23 bp, synthetic construct
  source 1..23: mol_type = other DNA
atacattgatccgcaacttaatc

SEQ ID NO: 3555 - DNA, 23 bp, synthetic construct
  source 1..23: mol_type = other DNA
catacattgatccgcaacttaat

SEQ ID NO: 3556 - DNA, 23 bp, synthetic construct
  source 1..23: mol_type = other DNA
ccatacattgatccgcaacttaa

SEQ ID NO: 3557 - DNA, 23 bp, synthetic construct
  source 1..23: mol_type = other DNA
cccatacattgatccgcaactta

SEQ ID NO: 3558 - DNA, 23 bp, synthetic construct
  source 1..23: mol_type = other DNA
tcccatacattgatccgcaactt

SEQ ID NO: 3559 - DNA, 23 bp, synthetic construct
  source 1..23: mol_type = other DNA
atcccatacattgatccgcaact

SEQ ID NO: 3560 - DNA, 23 bp, synthetic construct
  source 1..23: mol_type = other DNA
catcccatacattgatccgcaac

SEQ ID NO: 3561 - DNA, 23 bp, synthetic construct
  source 1..23: mol_type = other DNA
ccatcccatacattgatccgcaa

SEQ ID NO: 3562 - DNA, 23 bp, synthetic construct
  source 1..23: mol_type = other DNA
tccatcccatacattgatccgca

SEQ ID NO: 3563 - DNA, 23 bp, synthetic construct
  source 1..23: mol_type = other DNA
atccatcccatacattgatccgc

SEQ ID NO: 3564 - DNA, 23 bp, synthetic construct
  source 1..23: mol_type = other DNA
catccatcccatacattgatccg

SEQ ID NO: 3565 - DNA, 23 bp, synthetic construct
  source 1..23: mol_type = other DNA
tcatccatcccatacattgatcc

SEQ ID NO: 3566 - DNA, 23 bp, synthetic construct
  source 1..23: mol_type = other DNA
ttcatccatcccatacattgatc

SEQ ID NO: 3567 - DNA, 23 bp, synthetic construct
  source 1..23: mol_type = other DNA
attcatccatcccatacattgat

SEQ ID NO: 3568 - DNA, 23 bp, synthetic construct
  source 1..23: mol_type = other DNA
cattcatccatcccatacattga

SEQ ID NO: 3569 - DNA, 23 bp, synthetic construct
  source 1..23: mol_type = other DNA
ccattcatccatcccatacattg

SEQ ID NO: 3570 - DNA, 23 bp, synthetic construct
  source 1..23: mol_type = other DNA
tccattcatccatcccatacatt

SEQ ID NO: 3571 - DNA, 23 bp, synthetic construct
  source 1..23: mol_type = other DNA
atccattcatccatcccatacat

SEQ ID NO: 3572 - DNA, 23 bp, synthetic construct
  source 1..23: mol_type = other DNA
catccattcatccatcccataca

SEQ ID NO: 3573 - DNA, 23 bp, synthetic construct
  source 1..23: mol_type = other DNA
ccatccattcatccatcccatac

SEQ ID NO: 3574 - DNA, 23 bp, synthetic construct
  source 1..23: mol_type = other DNA
tccatccattcatccatcccata

SEQ ID NO: 3575 - DNA, 23 bp, synthetic construct
  source 1..23: mol_type = other DNA
atccatccattcatccatcccat

SEQ ID NO: 3576 - DNA, 23 bp, synthetic construct
  source 1..23: mol_type = other DNA
catccatccattcatccatccca

SEQ ID NO: 3577 - DNA, 23 bp, synthetic construct
  source 1..23: mol_type = other DNA
ccatccatccattcatccatccc

SEQ ID NO: 3578 - DNA, 23 bp, synthetic construct
  source 1..23: mol_type = other DNA
tccatccatccattcatccatcc

SEQ ID NO: 3579 - DNA, 23 bp, synthetic construct
  source 1..23: mol_type = other DNA
atccatccatccattcatccatc

SEQ ID NO: 3580 - DNA, 23 bp, synthetic construct
  source 1..23: mol_type = other DNA
catccatccatccattcatccat

SEQ ID NO: 3581 - DNA, 23 bp, synthetic construct
  source 1..23: mol_type = other DNA
ccatccatccatccattcatcca

SEQ ID NO: 3582 - DNA, 23 bp, synthetic construct
  source 1..23: mol_type = other DNA
tccatccatccatccattcatcc

SEQ ID NO: 3583 - DNA, 23 bp, synthetic construct
  source 1..23: mol_type = other DNA
atccatccatccatccattcatc

SEQ ID NO: 3584 - DNA, 23 bp, synthetic construct
  source 1..23: mol_type = other DNA
catccatccatccatccattcat

SEQ ID NO: 3585 - DNA, 23 bp, synthetic construct
  source 1..23: mol_type = other DNA
acatccatccatccatccattca

SEQ ID NO: 3586 - DNA, 23 bp, synthetic construct
  source 1..23: mol_type = other DNA
cacatccatccatccatccattc

SEQ ID NO: 3587 - DNA, 23 bp, synthetic construct
  source 1..23: mol_type = other DNA
acacatccatccatccatccatt

SEQ ID NO: 3588 - DNA, 23 bp, synthetic construct
  source 1..23: mol_type = other DNA
cacacatccatccatccatccat

SEQ ID NO: 3589 - DNA, 23 bp, synthetic construct
  source 1..23: mol_type = other DNA
ccacacatccatccatccatcca

SEQ ID NO: 3590 - DNA, 23 bp, synthetic construct
  source 1..23: mol_type = other DNA
accacacatccatccatccatcc

SEQ ID NO: 3591 - DNA, 23 bp, synthetic construct
  source 1..23: mol_type = other DNA
aaccacacatccatccatccatc

SEQ ID NO: 3592 - DNA, 23 bp, synthetic construct
  source 1..23: mol_type = other DNA
caaccacacatccatccatccat

SEQ ID NO: 3593 - DNA, 23 bp, synthetic construct
  source 1..23: mol_type = other DNA
tcaaccacacatccatccatcca

SEQ ID NO: 3594 - DNA, 23 bp, synthetic construct
  source 1..23: mol_type = other DNA
ttcaaccacacatccatccatcc

SEQ ID NO: 3595 - DNA, 23 bp, synthetic construct
  source 1..23: mol_type = other DNA
attcaaccacacatccatccatc

SEQ ID NO: 3596 - DNA, 23 bp, synthetic construct
  source 1..23: mol_type = other DNA
aattcaaccacacatccatccat

SEQ ID NO: 3597 - DNA, 23 bp, synthetic construct
  source 1..23: mol_type = other DNA
taattcaaccacacatccatcca

SEQ ID NO: 3598 - DNA, 23 bp, synthetic construct
  source 1..23: mol_type = other DNA
gtaattcaaccacacatccatcc

SEQ ID NO: 3599 - DNA, 23 bp, synthetic construct
  source 1..23: mol_type = other DNA
agtaattcaaccacacatccatc

SEQ ID NO: 3600 - DNA, 23 bp, synthetic construct
  source 1..23: mol_type = other DNA
cagtaattcaaccacacatccat

SEQ ID NO: 3601 - DNA, 23 bp, synthetic construct
  source 1..23: mol_type = other DNA
tcagtaattcaaccacacatcca

SEQ ID NO: 3602 - DNA, 23 bp, synthetic construct
  source 1..23: mol_type = other DNA
ttcagtaattcaaccacacatcc

SEQ ID NO: 3603 - DNA, 23 bp, synthetic construct
  source 1..23: mol_type = other DNA
tttcagtaattcaaccacacatc

SEQ ID NO: 3604 - DNA, 23 bp, synthetic construct
  source 1..23: mol_type = other DNA
ctttcagtaattcaaccacacat

SEQ ID NO: 3605 - DNA, 23 bp, synthetic construct
  source 1..23: mol_type = other DNA
cctttcagtaattcaaccacaca

SEQ ID NO: 3606 - DNA, 23 bp, synthetic construct
  source 1..23: mol_type = other DNA
acctttcagtaattcaaccacac

SEQ ID NO: 3607 - DNA, 23 bp, synthetic construct
  source 1..23: mol_type = other DNA
aacctttcagtaattcaaccaca

SEQ ID NO: 3608 - DNA, 23 bp, synthetic construct
  source 1..23: mol_type = other DNA
caacctttcagtaattcaaccac

SEQ ID NO: 3609 - DNA, 23 bp, synthetic construct
  source 1..23: mol_type = other DNA
ccaacctttcagtaattcaacca

SEQ ID NO: 3610 - DNA, 23 bp, synthetic construct
  source 1..23: mol_type = other DNA
tccaacctttcagtaattcaacc

SEQ ID NO: 3611 - DNA, 23 bp, synthetic construct
  source 1..23: mol_type = other DNA
ttccaacctttcagtaattcaac

SEQ ID NO: 3612 - DNA, 23 bp, synthetic construct
  source 1..23: mol_type = other DNA
cttccaacctttcagtaattcaa

SEQ ID NO: 3613 - DNA, 23 bp, synthetic construct
  source 1..23: mol_type = other DNA
tcttccaacctttcagtaattca

SEQ ID NO: 3614 - DNA, 23 bp, synthetic construct
  source 1..23: mol_type = other DNA
ctcttccaacctttcagtaattc

SEQ ID NO: 3615 - DNA, 23 bp, synthetic construct
  source 1..23: mol_type = other DNA
actcttccaacctttcagtaatt

SEQ ID NO: 3616 - DNA, 23 bp, synthetic construct
  source 1..23: mol_type = other DNA
cactcttccaacctttcagtaat

SEQ ID NO: 3617 - DNA, 23 bp, synthetic construct
  source 1..23: mol_type = other DNA
ccactcttccaacctttcagtaa

SEQ ID NO: 3618 - DNA, 23 bp, synthetic construct
  source 1..23: mol_type = other DNA
tccactcttccaacctttcagta

SEQ ID NO: 3619 - DNA, 23 bp, synthetic construct
  source 1..23: mol_type = other DNA
atccactcttccaacctttcagt

SEQ ID NO: 3620 - DNA, 23 bp, synthetic construct
  source 1..23: mol_type = other DNA
catccactcttccaacctttcag

SEQ ID NO: 3621 - DNA, 23 bp, synthetic construct
  source 1..23: mol_type = other DNA
ccatccactcttccaacctttca

SEQ ID NO: 3622 - DNA, 23 bp, synthetic construct
  source 1..23: mol_type = other DNA
cccatccactcttccaacctttc

SEQ ID NO: 3623 - DNA, 23 bp, synthetic construct
  source 1..23: mol_type = other DNA
acccatccactcttccaaccttt

SEQ ID NO: 3624 - DNA, 23 bp, synthetic construct
  source 1..23: mol_type = other DNA
cacccatccactcttccaacctt

SEQ ID NO: 3625 - DNA, 23 bp, synthetic construct
  source 1..23: mol_type = other DNA
tcacccatccactcttccaacct

SEQ ID NO: 3626 - DNA, 23 bp, synthetic construct
  source 1..23: mol_type = other DNA
ttcacccatccactcttccaacc

SEQ ID NO: 3627 - DNA, 23 bp, synthetic construct
  source 1..23: mol_type = other DNA
tttcacccatccactcttccaac

SEQ ID NO: 3628 - DNA, 23 bp, synthetic construct
  source 1..23: mol_type = other DNA
atttcacccatccactcttccaa

SEQ ID NO: 3629 - DNA, 23 bp, synthetic construct
  source 1..23: mol_type = other DNA
aatttcacccatccactcttcca

SEQ ID NO: 3630 - DNA, 23 bp, synthetic construct
  source 1..23: mol_type = other DNA
aaatttcacccatccactcttcc

SEQ ID NO: 3631 - DNA, 23 bp, synthetic construct
  source 1..23: mol_type = other DNA
caaatttcacccatccactcttc

SEQ ID NO: 3632 - DNA, 23 bp, synthetic construct
  source 1..23: mol_type = other DNA
ccaaatttcacccatccactctt

SEQ ID NO: 3633 - DNA, 23 bp, synthetic construct
  source 1..23: mol_type = other DNA
cccaaatttcacccatccactct

SEQ ID NO: 3634 - DNA, 23 bp, synthetic construct
  source 1..23: mol_type = other DNA
ccccaaatttcacccatccactc

SEQ ID NO: 3635 - DNA, 23 bp, synthetic construct
  source 1..23: mol_type = other DNA
accccaaatttcacccatccact

SEQ ID NO: 3636 - DNA, 23 bp, synthetic construct
  source 1..23: mol_type = other DNA
taccccaaatttcacccatccac

SEQ ID NO: 3637 - DNA, 23 bp, synthetic construct
  source 1..23: mol_type = other DNA
ctaccccaaatttcacccatcca

SEQ ID NO: 3638 - DNA, 23 bp, synthetic construct
  source 1..23: mol_type = other DNA
actaccccaaatttcacccatcc

SEQ ID NO: 3639 - DNA, 23 bp, synthetic construct
  source 1..23: mol_type = other DNA
aactaccccaaatttcacccatc

SEQ ID NO: 3640 - DNA, 23 bp, synthetic construct
  source 1..23: mol_type = other DNA
taactaccccaaatttcacccat

SEQ ID NO: 3641 - DNA, 23 bp, synthetic construct
  source 1..23: mol_type = other DNA
ctaactaccccaaatttcaccca

SEQ ID NO: 3642 - DNA, 23 bp, synthetic construct
  source 1..23: mol_type = other DNA
tctaactaccccaaatttcaccc

SEQ ID NO: 3643 - DNA, 23 bp, synthetic construct
  source 1..23: mol_type = other DNA
atctaactaccccaaatttcacc

SEQ ID NO: 3644 - DNA, 23 bp, synthetic construct
  source 1..23: mol_type = other DNA
catctaactaccccaaatttcac

SEQ ID NO: 3645 - DNA, 23 bp, synthetic construct
  source 1..23: mol_type = other DNA
ccatctaactaccccaaatttca

SEQ ID NO: 3646 - DNA, 23 bp, synthetic construct
  source 1..23: mol_type = other DNA
cccatctaactaccccaaatttc

SEQ ID NO: 3647 - DNA, 23 bp, synthetic construct
  source 1..23: mol_type = other DNA
acccatctaactaccccaaattt

SEQ ID NO: 3648 - DNA, 23 bp, synthetic construct
  source 1..23: mol_type = other DNA
cacccatctaactaccccaaatt

SEQ ID NO: 3649 - DNA, 23 bp, synthetic construct
  source 1..23: mol_type = other DNA
ccacccatctaactaccccaaat

SEQ ID NO: 3650 - DNA, 23 bp, synthetic construct
  source 1..23: mol_type = other DNA
cccacccatctaactaccccaaa

SEQ ID NO: 3651 - DNA, 23 bp, synthetic construct
  source 1..23: mol_type = other DNA
acccacccatctaactaccccaa

SEQ ID NO: 3652 - DNA, 23 bp, synthetic construct
  source 1..23: mol_type = other DNA
cacccacccatctaactacccca

SEQ ID NO: 3653 - DNA, 23 bp, synthetic construct
  source 1..23: mol_type = other DNA
acacccacccatctaactacccc

SEQ ID NO: 3654 - DNA, 23 bp, synthetic construct
  source 1..23: mol_type = other DNA
cacacccacccatctaactaccc

SEQ ID NO: 3655 - DNA, 23 bp, synthetic construct
  source 1..23: mol_type = other DNA
acacacccacccatctaactacc

SEQ ID NO: 3656 - DNA, 23 bp, synthetic construct
  source 1..23: mol_type = other DNA
cacacacccacccatctaactac

SEQ ID NO: 3657 - DNA, 23 bp, synthetic construct
  source 1..23: mol_type = other DNA
ccacacacccacccatctaacta

SEQ ID NO: 3658 - DNA, 23 bp, synthetic construct
  source 1..23: mol_type = other DNA
tccacacacccacccatctaact

SEQ ID NO: 3659 - DNA, 23 bp, synthetic construct
  source 1..23: mol_type = other DNA
atccacacacccacccatctaac

SEQ ID NO: 3660 - DNA, 23 bp, synthetic construct
  source 1..23: mol_type = other DNA
catccacacacccacccatctaa

SEQ ID NO: 3661 - DNA, 23 bp, synthetic construct
  source 1..23: mol_type = other DNA
ccatccacacacccacccatcta

SEQ ID NO: 3662 - DNA, 23 bp, synthetic construct
  source 1..23: mol_type = other DNA
tccatccacacacccacccatct

SEQ ID NO: 3663 - DNA, 23 bp, synthetic construct
  source 1..23: mol_type = other DNA
atccatccacacacccacccatc

SEQ ID NO: 3664 - DNA, 23 bp, synthetic construct
  source 1..23: mol_type = other DNA
tatccatccacacacccacccat

SEQ ID NO: 3665 - DNA, 23 bp, synthetic construct
  source 1..23: mol_type = other DNA
ttatccatccacacacccaccca

SEQ ID NO: 3666 - DNA, 23 bp, synthetic construct
  source 1..23: mol_type = other DNA
tttatccatccacacacccaccc

SEQ ID NO: 3667 - DNA, 23 bp, synthetic construct
  source 1..23: mol_type = other DNA
ttttatccatccacacacccacc

SEQ ID NO: 3668 - DNA, 23 bp, synthetic construct
  source 1..23: mol_type = other DNA
cttttatccatccacacacccac

SEQ ID NO: 3669 - DNA, 23 bp, synthetic construct
  source 1..23: mol_type = other DNA
tcttttatccatccacacaccca

SEQ ID NO: 3670 - DNA, 23 bp, synthetic construct
  source 1..23: mol_type = other DNA
ctcttttatccatccacacaccc

SEQ ID NO: 3671 - DNA, 23 bp, synthetic construct
  source 1..23: mol_type = other DNA
actcttttatccatccacacacc

SEQ ID NO: 3672 - DNA, 23 bp, synthetic construct
  source 1..23: mol_type = other DNA
tactcttttatccatccacacac

SEQ ID NO: 3673 - DNA, 23 bp, synthetic construct
  source 1..23: mol_type = other DNA
ctactcttttatccatccacaca

SEQ ID NO: 3674 - DNA, 23 bp, synthetic construct
  source 1..23: mol_type = other DNA
tctactcttttatccatccacac

SEQ ID NO: 3675 - DNA, 23 bp, synthetic construct
  source 1..23: mol_type = other DNA
atctactcttttatccatccaca

SEQ ID NO: 3676 - DNA, 23 bp, synthetic construct
  source 1..23: mol_type = other DNA
catctactcttttatccatccac

SEQ ID NO: 3677 - DNA, 23 bp, synthetic construct
  source 1..23: mol_type = other DNA
tcatctactcttttatccatcca

SEQ ID NO: 3678 - DNA, 23 bp, synthetic construct
  source 1..23: mol_type = other DNA
ttcatctactcttttatccatcc

SEQ ID NO: 3679 - DNA, 23 bp, synthetic construct
  source 1..23: mol_type = other DNA
attcatctactcttttatccatc

SEQ ID NO: 3680 - DNA, 23 bp, synthetic construct
  source 1..23: mol_type = other DNA
cattcatctactcttttatccat

SEQ ID NO: 3681 - DNA, 23 bp, synthetic construct
  source 1..23: mol_type = other DNA
tcattcatctactcttttatcca

SEQ ID NO: 3682 - DNA, 23 bp, synthetic construct
  source 1..23: mol_type = other DNA
ttcattcatctactcttttatcc

SEQ ID NO: 3683 - DNA, 23 bp, synthetic construct
  source 1..23: mol_type = other DNA
attcattcatctactcttttatc

SEQ ID NO: 3684 - DNA, 23 bp, synthetic construct
  source 1..23: mol_type = other DNA
aattcattcatctactcttttat

SEQ ID NO: 3685 - DNA, 23 bp, synthetic construct
  source 1..23: mol_type = other DNA
taattcattcatctactctttta

SEQ ID NO: 3686 - DNA, 23 bp, synthetic construct
  source 1..23: mol_type = other DNA
ttaattcattcatctactctttt

SEQ ID NO: 3687 - DNA, 23 bp, synthetic construct
  source 1..23: mol_type = other DNA
attaattcattcatctactcttt

SEQ ID NO: 3688 - DNA, 23 bp, synthetic construct
  source 1..23: mol_type = other DNA
cattaattcattcatctactctt

SEQ ID NO: 3689 - DNA, 23 bp, synthetic construct
  source 1..23: mol_type = other DNA
tcattaattcattcatctactct

SEQ ID NO: 3690 - DNA, 23 bp, synthetic construct
  source 1..23: mol_type = other DNA
ttcattaattcattcatctactc

SEQ ID NO: 3691 - DNA, 23 bp, synthetic construct
  source 1..23: mol_type = other DNA
attcattaattcattcatctact

SEQ ID NO: 3692 - DNA, 23 bp, synthetic construct
  source 1..23: mol_type = other DNA
tattcattaattcattcatctac

SEQ ID NO: 3693 - DNA, 23 bp, synthetic construct
  source 1..23: mol_type = other DNA
ttattcattaattcattcatcta

SEQ ID NO: 3694 - DNA, 23 bp, synthetic construct
  source 1..23: mol_type = other DNA
tttattcattaattcattcatct

SEQ ID NO: 3695 - DNA, 23 bp, synthetic construct
  source 1..23: mol_type = other DNA
gtttattcattaattcattcatc

SEQ ID NO: 3696 - DNA, 23 bp, synthetic construct
  source 1..23: mol_type = other DNA
tgtttattcattaattcattcat

SEQ ID NO: 3697 - DNA, 23 bp, synthetic construct
  source 1..23: mol_type = other DNA
ctgtttattcattaattcattca

SEQ ID NO: 3698 - DNA, 23 bp, synthetic construct
  source 1..23: mol_type = other DNA
cctgtttattcattaattcattc

SEQ ID NO: 3699 - DNA, 23 bp, synthetic construct
  source 1..23: mol_type = other DNA
gcctgtttattcattaattcatt

SEQ ID NO: 3700 - DNA, 23 bp, synthetic construct
  source 1..23: mol_type = other DNA
tgcctgtttattcattaattcat

SEQ ID NO: 3701 - DNA, 23 bp, synthetic construct
  source 1..23: mol_type = other DNA
ctgcctgtttattcattaattca

SEQ ID NO: 3702 - DNA, 23 bp, synthetic construct
  source 1..23: mol_type = other DNA
tctgcctgtttattcattaattc

SEQ ID NO: 3703 - DNA, 23 bp, synthetic construct
  source 1..23: mol_type = other DNA
atctgcctgtttattcattaatt

SEQ ID NO: 3704 - DNA, 23 bp, synthetic construct
  source 1..23: mol_type = other DNA
catctgcctgtttattcattaat

SEQ ID NO: 3705 - DNA, 23 bp, synthetic construct
  source 1..23: mol_type = other DNA
ccatctgcctgtttattcattaa

SEQ ID NO: 3706 - DNA, 23 bp, synthetic construct
  source 1..23: mol_type = other DNA
tccatctgcctgtttattcatta

SEQ ID NO: 3707 - DNA, 23 bp, synthetic construct
  source 1..23: mol_type = other DNA
atccatctgcctgtttattcatt

SEQ ID NO: 3708 - DNA, 23 bp, synthetic construct
  source 1..23: mol_type = other DNA
catccatctgcctgtttattcat

SEQ ID NO: 3709 - DNA, 23 bp, synthetic construct
  source 1..23: mol_type = other DNA
tcatccatctgcctgtttattca

SEQ ID NO: 3710 - DNA, 23 bp, synthetic construct
  source 1..23: mol_type = other DNA
atcatccatctgcctgtttattc

SEQ ID NO: 3711 - DNA, 23 bp, synthetic construct
  source 1..23: mol_type = other DNA
catcatccatctgcctgtttatt

SEQ ID NO: 3712 - DNA, 23 bp, synthetic construct
  source 1..23: mol_type = other DNA
acatcatccatctgcctgtttat

SEQ ID NO: 3713 - DNA, 23 bp, synthetic construct
  source 1..23: mol_type = other DNA
tacatcatccatctgcctgttta

SEQ ID NO: 3714 - DNA, 23 bp, synthetic construct
  source 1..23: mol_type = other DNA
ttacatcatccatctgcctgttt

SEQ ID NO: 3715 - DNA, 23 bp, synthetic construct
  source 1..23: mol_type = other DNA
cttacatcatccatctgcctgtt

SEQ ID NO: 3716 - DNA, 23 bp, synthetic construct
  source 1..23: mol_type = other DNA
gcttacatcatccatctgcctgt

SEQ ID NO: 3717 - DNA, 23 bp, synthetic construct
  source 1..23: mol_type = other DNA
agcttacatcatccatctgcctg

SEQ ID NO: 3718 - DNA, 23 bp, synthetic construct
  source 1..23: mol_type = other DNA
cagcttacatcatccatctgcct

SEQ ID NO: 3719 - DNA, 23 bp, synthetic construct
  source 1..23: mol_type = other DNA
gcagcttacatcatccatctgcc

SEQ ID NO: 3720 - DNA, 23 bp, synthetic construct
  source 1..23: mol_type = other DNA
ggcagcttacatcatccatctgc

SEQ ID NO: 3721 - DNA, 23 bp, synthetic construct
  source 1..23: mol_type = other DNA
gggcagcttacatcatccatctg

SEQ ID NO: 3722 - DNA, 23 bp, synthetic construct
  source 1..23: mol_type = other DNA
ggggcagcttacatcatccatct

SEQ ID NO: 3723 - DNA, 23 bp, synthetic construct
  source 1..23: mol_type = other DNA
tggggcagcttacatcatccatc

SEQ ID NO: 3724 - DNA, 23 bp, synthetic construct
  source 1..23: mol_type = other DNA
ctggggcagcttacatcatccat

SEQ ID NO: 3725 - DNA, 23 bp, synthetic construct
  source 1..23: mol_type = other DNA
tctggggcagcttacatcatcca

SEQ ID NO: 3726 - DNA, 23 bp, synthetic construct
  source 1..23: mol_type = other DNA
gtctggggcagcttacatcatcc

SEQ ID NO: 3727 - DNA, 23 bp, synthetic construct
  source 1..23: mol_type = other DNA
ggtctggggcagcttacatcatc

SEQ ID NO: 3728 - DNA, 23 bp, synthetic construct
  source 1..23: mol_type = other DNA
gggtctggggcagcttacatcat

SEQ ID NO: 3729 - DNA, 23 bp, synthetic construct
  source 1..23: mol_type = other DNA
agggtctggggcagcttacatca

SEQ ID NO: 3730 - DNA, 23 bp, synthetic construct
  source 1..23: mol_type = other DNA
cagggtctggggcagcttacatc

SEQ ID NO: 3731 - DNA, 23 bp, synthetic construct
  source 1..23: mol_type = other DNA
ccagggtctggggcagcttacat

SEQ ID NO: 3732 - DNA, 23 bp, synthetic construct
  source 1..23: mol_type = other DNA
cccagggtctggggcagcttaca

SEQ ID NO: 3733 - DNA, 23 bp, synthetic construct
  source 1..23: mol_type = other DNA
tcccagggtctggggcagcttac

SEQ ID NO: 3734 - DNA, 23 bp, synthetic construct
  source 1..23: mol_type = other DNA
gtcccagggtctggggcagctta

SEQ ID NO: 3735 - DNA, 23 bp, synthetic construct
  source 1..23: mol_type = other DNA
ggtcccagggtctggggcagctt

SEQ ID NO: 3736 - DNA, 23 bp, synthetic construct
  source 1..23: mol_type = other DNA
aggtcccagggtctggggcagct

SEQ ID NO: 3737 - DNA, 23 bp, synthetic construct
  source 1..23: mol_type = other DNA
gaggtcccagggtctggggcagc

SEQ ID NO: 3738 - DNA, 23 bp, synthetic construct
  source 1..23: mol_type = other DNA
agaggtcccagggtctggggcag

SEQ ID NO: 3739 - DNA, 23 bp, synthetic construct
  source 1..23: mol_type = other DNA
cagaggtcccagggtctggggca

SEQ ID NO: 3740 - DNA, 23 bp, synthetic construct
  source 1..23: mol_type = other DNA
tcagaggtcccagggtctggggc

SEQ ID NO: 3741 - DNA, 23 bp, synthetic construct
  source 1..23: mol_type = other DNA
gtcagaggtcccagggtctgggg

SEQ ID NO: 3742 - DNA, 23 bp, synthetic construct
  source 1..23: mol_type = other DNA
ggtcagaggtcccagggtctggg

SEQ ID NO: 3743 - DNA, 23 bp, synthetic construct
  source 1..23: mol_type = other DNA
gggtcagaggtcccagggtctgg

SEQ ID NO: 3744 - DNA, 23 bp, synthetic construct
  source 1..23: mol_type = other DNA
ggggtcagaggtcccagggtctg

SEQ ID NO: 3745 - DNA, 23 bp, synthetic construct
  source 1..23: mol_type = other DNA
gggggtcagaggtcccagggtct

SEQ ID NO: 3746 - DNA, 23 bp, synthetic construct
  source 1..23: mol_type = other DNA
cgggggtcagaggtcccagggtc

SEQ ID NO: 3747 - DNA, 23 bp, synthetic construct
  source 1..23: mol_type = other DNA
ccgggggtcagaggtcccagggt

SEQ ID NO: 3748 - DNA, 23 bp, synthetic construct
  source 1..23: mol_type = other DNA
gccgggggtcagaggtcccaggg

SEQ ID NO: 3749 - DNA, 23 bp, synthetic construct
  source 1..23: mol_type = other DNA
cgccgggggtcagaggtcccagg

SEQ ID NO: 3750 - DNA, 23 bp, synthetic construct
  source 1..23: mol_type = other DNA
tcgccgggggtcagaggtcccag

SEQ ID NO: 3751 - DNA, 23 bp, synthetic construct
  source 1..23: mol_type = other DNA
gtcgccgggggtcagaggtccca

SEQ ID NO: 3752 - DNA, 23 bp, synthetic construct
  source 1..23: mol_type = other DNA
ggtcgccgggggtcagaggtccc

SEQ ID NO: 3753 - DNA, 23 bp, synthetic construct
  source 1..23: mol_type = other DNA
gggtcgccgggggtcagaggtcc

SEQ ID NO: 3754 - DNA, 23 bp, synthetic construct
  source 1..23: mol_type = other DNA
ggggtcgccgggggtcagaggtc

SEQ ID NO: 3755 - DNA, 23 bp, synthetic construct
  source 1..23: mol_type = other DNA
aggggtcgccgggggtcagaggt

SEQ ID NO: 3756 - DNA, 23 bp, synthetic construct
  source 1..23: mol_type = other DNA
aaggggtcgccgggggtcagagg

SEQ ID NO: 3757 - DNA, 23 bp, synthetic construct
  source 1..23: mol_type = other DNA
caaggggtcgccgggggtcagag

SEQ ID NO: 3758 - DNA, 23 bp, synthetic construct
  source 1..23: mol_type = other DNA
gcaaggggtcgccgggggtcaga

SEQ ID NO: 3759 - DNA, 23 bp, synthetic construct
  source 1..23: mol_type = other DNA
tgcaaggggtcgccgggggtcag

SEQ ID NO: 3760 - DNA, 23 bp, synthetic construct
  source 1..23: mol_type = other DNA
gtgcaaggggtcgccgggggtca

SEQ ID NO: 3761 - DNA, 23 bp, synthetic construct
  source 1..23: mol_type = other DNA
agtgcaaggggtcgccgggggtc

SEQ ID NO: 3762 - DNA, 23 bp, synthetic construct
  source 1..23: mol_type = other DNA
gagtgcaaggggtcgccgggggt

SEQ ID NO: 3763 - DNA, 23 bp, synthetic construct
  source 1..23: mol_type = other DNA
agagtgcaaggggtcgccggggg

SEQ ID NO: 3764 - DNA, 23 bp, synthetic construct
  source 1..23: mol_type = other DNA
gagagtgcaaggggtcgccgggg

SEQ ID NO: 3765 - DNA, 23 bp, synthetic construct
  source 1..23: mol_type = other DNA
ggagagtgcaaggggtcgccggg

SEQ ID NO: 3766 - DNA, 23 bp, synthetic construct
  source 1..23: mol_type = other DNA
tggagagtgcaaggggtcgccgg

SEQ ID NO: 3767 - DNA, 23 bp, synthetic construct
  source 1..23: mol_type = other DNA
atggagagtgcaaggggtcgccg

SEQ ID NO: 3768 - DNA, 23 bp, synthetic construct
  source 1..23: mol_type = other DNA
catggagagtgcaaggggtcgcc

SEQ ID NO: 3769 - DNA, 23 bp, synthetic construct
  source 1..23: mol_type = other DNA
tcatggagagtgcaaggggtcgc

SEQ ID NO: 3770 - DNA, 23 bp, synthetic construct
  source 1..23: mol_type = other DNA
gtcatggagagtgcaaggggtcg

SEQ ID NO: 3771 - DNA, 23 bp, synthetic construct
  source 1..23: mol_type = other DNA
tgtcatggagagtgcaaggggtc

SEQ ID NO: 3772 - DNA, 23 bp, synthetic construct
  source 1..23: mol_type = other DNA
gtgtcatggagagtgcaaggggt

SEQ ID NO: 3773 - DNA, 23 bp, synthetic construct
  source 1..23: mol_type = other DNA
agtgtcatggagagtgcaagggg

SEQ ID NO: 3774 - DNA, 23 bp, synthetic construct
  source 1..23: mol_type = other DNA
aagtgtcatggagagtgcaaggg

SEQ ID NO: 3775 - DNA, 23 bp, synthetic construct
  source 1..23: mol_type = other DNA
aaagtgtcatggagagtgcaagg

SEQ ID NO: 3776 - DNA, 23 bp, synthetic construct
  source 1..23: mol_type = other DNA
gaaagtgtcatggagagtgcaag

SEQ ID NO: 3777 - DNA, 23 bp, synthetic construct
  source 1..23: mol_type = other DNA
agaaagtgtcatggagagtgcaa

SEQ ID NO: 3778 - DNA, 23 bp, synthetic construct
  source 1..23: mol_type = other DNA
gagaaagtgtcatggagagtgca

SEQ ID NO: 3779 - DNA, 23 bp, synthetic construct
  source 1..23: mol_type = other DNA
agagaaagtgtcatggagagtgc

SEQ ID NO: 3780 - DNA, 23 bp, synthetic construct
  source 1..23: mol_type = other DNA
gagagaaagtgtcatggagagtg

SEQ ID NO: 3781 - DNA, 23 bp, synthetic construct
  source 1..23: mol_type = other DNA
ggagagaaagtgtcatggagagt

SEQ ID NO: 3782 - DNA, 23 bp, synthetic construct
  source 1..23: mol_type = other DNA
gggagagaaagtgtcatggagag

SEQ ID NO: 3783 - DNA, 23 bp, synthetic construct
  source 1..23: mol_type = other DNA
tgggagagaaagtgtcatggaga

SEQ ID NO: 3784 - DNA, 23 bp, synthetic construct
  source 1..23: mol_type = other DNA
atgggagagaaagtgtcatggag

SEQ ID NO: 3785 - DNA, 23 bp, synthetic construct
  source 1..23: mol_type = other DNA
catgggagagaaagtgtcatgga

SEQ ID NO: 3786 - DNA, 23 bp, synthetic construct
  source 1..23: mol_type = other DNA
ccatgggagagaaagtgtcatgg

SEQ ID NO: 3787 - DNA, 23 bp, synthetic construct
  source 1..23: mol_type = other DNA
accatgggagagaaagtgtcatg

SEQ ID NO: 3788 - DNA, 23 bp, synthetic construct
  source 1..23: mol_type = other DNA
caccatgggagagaaagtgtcat

SEQ ID NO: 3789 - DNA, 23 bp, synthetic construct
  source 1..23: mol_type = other DNA
ccaccatgggagagaaagtgtca

SEQ ID NO: 3790 - DNA, 23 bp, synthetic construct
  source 1..23: mol_type = other DNA
gccaccatgggagagaaagtgtc

SEQ ID NO: 3791 - DNA, 23 bp, synthetic construct
  source 1..23: mol_type = other DNA
tgccaccatgggagagaaagtgt

SEQ ID NO: 3792 - DNA, 23 bp, synthetic construct
  source 1..23: mol_type = other DNA
ctgccaccatgggagagaaagtg

SEQ ID NO: 3793 - DNA, 23 bp, Homo sapiens
  source 1..23: mol_type = genomic DNA
gagggtcattgctcggcccctcc

SEQ ID NO: 3794 - DNA, 23 bp, Homo sapiens
  source 1..23: mol_type = genomic DNA
agggtcattgctcggcccctccc

SEQ ID NO: 3795 - DNA, 23 bp, Homo sapiens
  source 1..23: mol_type = genomic DNA
gggtcattgctcggcccctccca

SEQ ID NO: 3796 - DNA, 23 bp, Homo sapiens
  source 1..23: mol_type = genomic DNA
ggtcattgctcggcccctcccat

SEQ ID NO: 3797 - DNA, 23 bp, Homo sapiens
  source 1..23: mol_type = genomic DNA
gtcattgctcggcccctcccatg

SEQ ID NO: 3798 - DNA, 23 bp, Homo sapiens
  source 1..23: mol_type = genomic DNA
tcattgctcggcccctcccatgc

SEQ ID NO: 3799 - DNA, 23 bp, Homo sapiens
  source 1..23: mol_type = genomic DNA
cattgctcggcccctcccatgcc

SEQ ID NO: 3800 - DNA, 23 bp, Homo sapiens
  source 1..23: mol_type = genomic DNA
attgctcggcccctcccatgcca

SEQ ID NO: 3801 - DNA, 23 bp, Homo sapiens
  source 1..23: mol_type = genomic DNA
ttgctcggcccctcccatgccac

SEQ ID NO: 3802 - DNA, 23 bp, Homo sapiens
  source 1..23: mol_type = genomic DNA
tgctcggcccctcccatgccact

SEQ ID NO: 3803 - DNA, 23 bp, Homo sapiens
  source 1..23: mol_type = genomic DNA
gctcggcccctcccatgccactt

SEQ ID NO: 3804 - DNA, 23 bp, Homo sapiens
  source 1..23: mol_type = genomic DNA
ctcggcccctcccatgccacttc

SEQ ID NO: 3805 - DNA, 23 bp, Homo sapiens
  source 1..23: mol_type = genomic DNA
tcggcccctcccatgccacttcc

SEQ ID NO: 3806 - DNA, 23 bp, Homo sapiens
  source 1..23: mol_type = genomic DNA
cggcccctcccatgccacttcca

SEQ ID NO: 3807 - DNA, 23 bp, Homo sapiens
  source 1..23: mol_type = genomic DNA
ggcccctcccatgccacttccac

SEQ ID NO: 3808 - DNA, 23 bp, Homo sapiens
  source 1..23: mol_type = genomic DNA
gcccctcccatgccacttccact

SEQ ID NO: 3809 - DNA, 23 bp, Homo sapiens
  source 1..23: mol_type = genomic DNA
cccctcccatgccacttccactc

SEQ ID NO: 3810 - DNA, 23 bp, Homo sapiens
  source 1..23: mol_type = genomic DNA
ccctcccatgccacttccactca

SEQ ID NO: 3811 - DNA, 23 bp, Homo sapiens
  source 1..23: mol_type = genomic DNA
cctcccatgccacttccactcac

SEQ ID NO: 3812 - DNA, 23 bp, Homo sapiens
  source 1..23: mol_type = genomic DNA
ctcccatgccacttccactcacc

SEQ ID NO: 3813 - DNA, 23 bp, Homo sapiens
  source 1..23: mol_type = genomic DNA
tcccatgccacttccactcacca

SEQ ID NO: 3814 - DNA, 23 bp, Homo sapiens
  source 1..23: mol_type = genomic DNA
cccatgccacttccactcaccat

SEQ ID NO: 3815 - DNA, 23 bp, Homo sapiens
  source 1..23: mol_type = genomic DNA
ccatgccacttccactcaccatt

SEQ ID NO: 3816 - DNA, 23 bp, Homo sapiens
  source 1..23: mol_type = genomic DNA
catgccacttccactcaccattc

SEQ ID NO: 3817 - DNA, 23 bp, Homo sapiens
  source 1..23: mol_type = genomic DNA
atgccacttccactcaccattcc

SEQ ID NO: 3818 - DNA, 23 bp, Homo sapiens
  source 1..23: mol_type = genomic DNA
tgccacttccactcaccattcct

SEQ ID NO: 3819 - DNA, 23 bp, Homo sapiens
  source 1..23: mol_type = genomic DNA
gccacttccactcaccattcctg

SEQ ID NO: 3820 - DNA, 23 bp, Homo sapiens
  source 1..23: mol_type = genomic DNA
ccacttccactcaccattcctgc

SEQ ID NO: 3821 - DNA, 23 bp, Homo sapiens
  source 1..23: mol_type = genomic DNA
cacttccactcaccattcctgcc

SEQ ID NO: 3822 - DNA, 23 bp, Homo sapiens
  source 1..23: mol_type = genomic DNA
acttccactcaccattcctgcct

SEQ ID NO: 3823 - DNA, 23 bp, Homo sapiens
  source 1..23: mol_type = genomic DNA
cttccactcaccattcctgcctg

SEQ ID NO: 3824 - DNA, 23 bp, Homo sapiens
  source 1..23: mol_type = genomic DNA
ttccactcaccattcctgcctgc

SEQ ID NO: 3825 - DNA, 23 bp, Homo sapiens
  source 1..23: mol_type = genomic DNA
tccactcaccattcctgcctgcc

SEQ ID NO: 3826 - DNA, 23 bp, Homo sapiens
  source 1..23: mol_type = genomic DNA
ccactcaccattcctgcctgccc

SEQ ID NO: 3827 - DNA, 23 bp, Homo sapiens
  source 1..23: mol_type = genomic DNA
cactcaccattcctgcctgccca

SEQ ID NO: 3828 - DNA, 23 bp, Homo sapiens
  source 1..23: mol_type = genomic DNA
actcaccattcctgcctgcccag

SEQ ID NO: 3829 - DNA, 23 bp, Homo sapiens
  source 1..23: mol_type = genomic DNA
ctcaccattcctgcctgcccagc

SEQ ID NO: 3830 - DNA, 23 bp, Homo sapiens
  source 1..23: mol_type = genomic DNA
tcaccattcctgcctgcccagct

SEQ ID NO: 3831 - DNA, 23 bp, Homo sapiens
  source 1..23: mol_type = genomic DNA
caccattcctgcctgcccagctc

SEQ ID NO: 3832 - DNA, 23 bp, Homo sapiens
  source 1..23: mol_type = genomic DNA
accattcctgcctgcccagctct

SEQ ID NO: 3833 - DNA, 23 bp, Homo sapiens
  source 1..23: mol_type = genomic DNA
ccattcctgcctgcccagctctt

SEQ ID NO: 3834 - DNA, 23 bp, Homo sapiens
  source 1..23: mol_type = genomic DNA
cattcctgcctgcccagctcttc

SEQ ID NO: 3835 - DNA, 23 bp, Homo sapiens
  source 1..23: mol_type = genomic DNA
attcctgcctgcccagctcttcc

SEQ ID NO: 3836 - DNA, 23 bp, Homo sapiens
  source 1..23: mol_type = genomic DNA
ttcctgcctgcccagctcttcct

SEQ ID NO: 3837 - DNA, 23 bp, Homo sapiens
  source 1..23: mol_type = genomic DNA
tcctgcctgcccagctcttcctc

SEQ ID NO: 3838 - DNA, 23 bp, Homo sapiens
  source 1..23: mol_type = genomic DNA
cctgcctgcccagctcttcctct

SEQ ID NO: 3839 - DNA, 23 bp, Homo sapiens
  source 1..23: mol_type = genomic DNA
ctgcctgcccagctcttcctctt

SEQ ID NO: 3840 - DNA, 23 bp, Homo sapiens
  source 1..23: mol_type = genomic DNA
tgcctgcccagctcttcctcttt

SEQ ID NO: 3841 - DNA, 23 bp, Homo sapiens
  source 1..23: mol_type = genomic DNA
gcctgcccagctcttcctctttc

SEQ ID NO: 3842 - DNA, 23 bp, Homo sapiens
  source 1..23: mol_type = genomic DNA
cctgcccagctcttcctctttct

SEQ ID NO: 3843 - DNA, 23 bp, Homo sapiens
  source 1..23: mol_type = genomic DNA
ctgcccagctcttcctctttctg

SEQ ID NO: 3844 - DNA, 23 bp, Homo sapiens
  source 1..23: mol_type = genomic DNA
tgcccagctcttcctctttctgg

SEQ ID NO: 3845 - DNA, 23 bp, Homo sapiens
  source 1..23: mol_type = genomic DNA
gcccagctcttcctctttctggc

SEQ ID NO: 3846 - DNA, 23 bp, Homo sapiens
  source 1..23: mol_type = genomic DNA
cccagctcttcctctttctggcc

SEQ ID NO: 3847 - DNA, 23 bp, Homo sapiens
  source 1..23: mol_type = genomic DNA
ccagctcttcctctttctggcca

SEQ ID NO: 3848 - DNA, 23 bp, Homo sapiens
  source 1..23: mol_type = genomic DNA
cagctcttcctctttctggccac

SEQ ID NO: 3849 - DNA, 23 bp, Homo sapiens
  source 1..23: mol_type = genomic DNA
agctcttcctctttctggccaca

SEQ ID NO: 3850 - DNA, 23 bp, Homo sapiens
  source 1..23: mol_type = genomic DNA
gctcttcctctttctggccacac

SEQ ID NO: 3851 - DNA, 23 bp, Homo sapiens
  source 1..23: mol_type = genomic DNA
ctcttcctctttctggccacacc

SEQ ID NO: 3852 - DNA, 23 bp, Homo sapiens
  source 1..23: mol_type = genomic DNA
tcttcctctttctggccacacca

SEQ ID NO: 3853 - DNA, 23 bp, Homo sapiens
  source 1..23: mol_type = genomic DNA
cttcctctttctggccacaccat

SEQ ID NO: 3854 - DNA, 23 bp, Homo sapiens
  source 1..23: mol_type = genomic DNA
ttcctctttctggccacaccatc

SEQ ID NO: 3855 - DNA, 23 bp, Homo sapiens
  source 1..23: mol_type = genomic DNA
tcctctttctggccacaccatcc

SEQ ID NO: 3856 - DNA, 23 bp, Homo sapiens
  source 1..23: mol_type = genomic DNA
cctctttctggccacaccatcca

SEQ ID NO: 3857 - DNA, 23 bp, Homo sapiens
  source 1..23: mol_type = genomic DNA
ctctttctggccacaccatccac

SEQ ID NO: 3858 - DNA, 23 bp, Homo sapiens
  source 1..23: mol_type = genomic DNA
tctttctggccacaccatccaca

SEQ ID NO: 3859 - DNA, 23 bp, Homo sapiens
  source 1..23: mol_type = genomic DNA
ctttctggccacaccatccacac

SEQ ID NO: 3860 - DNA, 23 bp, Homo sapiens
  source 1..23: mol_type = genomic DNA
tttctggccacaccatccacact

SEQ ID NO: 3861 - DNA, 23 bp, Homo sapiens
  source 1..23: mol_type = genomic DNA
ttctggccacaccatccacactc

SEQ ID NO: 3862 - DNA, 23 bp, Homo sapiens
  source 1..23: mol_type = genomic DNA
tctggccacaccatccacactct

SEQ ID NO: 3863 - DNA, 23 bp, Homo sapiens
  source 1..23: mol_type = genomic DNA
ctggccacaccatccacactctc

SEQ ID NO: 3864 - DNA, 23 bp, Homo sapiens
  source 1..23: mol_type = genomic DNA
tggccacaccatccacactctcc

SEQ ID NO: 3865 - DNA, 23 bp, Homo sapiens
  source 1..23: mol_type = genomic DNA
ggccacaccatccacactctcct

SEQ ID NO: 3866 - DNA, 23 bp, Homo sapiens
  source 1..23: mol_type = genomic DNA
gccacaccatccacactctcctg

SEQ ID NO: 3867 - DNA, 23 bp, Homo sapiens
  source 1..23: mol_type = genomic DNA
ccacaccatccacactctcctgg

SEQ ID NO: 3868 - DNA, 23 bp, Homo sapiens
  source 1..23: mol_type = genomic DNA
cacaccatccacactctcctggc

SEQ ID NO: 3869 - DNA, 23 bp, Homo sapiens
  source 1..23: mol_type = genomic DNA
acaccatccacactctcctggcc

SEQ ID NO: 3870 - DNA, 23 bp, Homo sapiens
  source 1..23: mol_type = genomic DNA
caccatccacactctcctggccc

SEQ ID NO: 3871 - DNA, 23 bp, Homo sapiens
  source 1..23: mol_type = genomic DNA
accatccacactctcctggccct

SEQ ID NO: 3872 - DNA, 23 bp, Homo sapiens
  source 1..23: mol_type = genomic DNA
ccatccacactctcctggccctc

SEQ ID NO: 3873 - DNA, 23 bp, Homo sapiens
  source 1..23: mol_type = genomic DNA
catccacactctcctggccctct

SEQ ID NO: 3874 - DNA, 23 bp, Homo sapiens
  source 1..23: mol_type = genomic DNA
atccacactctcctggccctctg

SEQ ID NO: 3875 - DNA, 23 bp, Homo sapiens
  source 1..23: mol_type = genomic DNA
tccacactctcctggccctctga

SEQ ID NO: 3876 - DNA, 23 bp, Homo sapiens
  source 1..23: mol_type = genomic DNA
ccacactctcctggccctctgag

SEQ ID NO: 3877 - DNA, 23 bp, Homo sapiens
  source 1..23: mol_type = genomic DNA
cacactctcctggccctctgaga

SEQ ID NO: 3878 - DNA, 23 bp, Homo sapiens
  source 1..23: mol_type = genomic DNA
acactctcctggccctctgagac

SEQ ID NO: 3879 - DNA, 23 bp, Homo sapiens
  source 1..23: mol_type = genomic DNA
cactctcctggccctctgagact

SEQ ID NO: 3880 - DNA, 23 bp, Homo sapiens
  source 1..23: mol_type = genomic DNA
actctcctggccctctgagactg

SEQ ID NO: 3881 - DNA, 23 bp, Homo sapiens
  source 1..23: mol_type = genomic DNA
ctctcctggccctctgagactgc

SEQ ID NO: 3882 - DNA, 23 bp, Homo sapiens
  source 1..23: mol_type = genomic DNA
tctcctggccctctgagactgcc

SEQ ID NO: 3883 - DNA, 23 bp, Homo sapiens
  source 1..23: mol_type = genomic DNA
ctcctggccctctgagactgccc

SEQ ID NO: 3884 - DNA, 23 bp, Homo sapiens
  source 1..23: mol_type = genomic DNA
tcctggccctctgagactgcccg

SEQ ID NO: 3885 - DNA, 23 bp, Homo sapiens
  source 1..23: mol_type = genomic DNA
cctggccctctgagactgcccgc

SEQ ID NO: 3886 - DNA, 23 bp, Homo sapiens
  source 1..23: mol_type = genomic DNA
ctggccctctgagactgcccgcc

SEQ ID NO: 3887 - DNA, 23 bp, Homo sapiens
  source 1..23: mol_type = genomic DNA
tggccctctgagactgcccgcca

SEQ ID NO: 3888 - DNA, 23 bp, Homo sapiens
  source 1..23: mol_type = genomic DNA
ggccctctgagactgcccgccat

SEQ ID NO: 3889 - DNA, 23 bp, Homo sapiens
  source 1..23: mol_type = genomic DNA
gccctctgagactgcccgccatg

SEQ ID NO: 3890 - DNA, 23 bp, Homo sapiens
  source 1..23: mol_type = genomic DNA
ccctctgagactgcccgccatgc

SEQ ID NO: 3891 - DNA, 23 bp, Homo sapiens
  source 1..23: mol_type = genomic DNA
cctctgagactgcccgccatgcc

SEQ ID NO: 3892 - DNA, 23 bp, Homo sapiens
  source 1..23: mol_type = genomic DNA
ctctgagactgcccgccatgcca

SEQ ID NO: 3893 - DNA, 23 bp, Homo sapiens
  source 1..23: mol_type = genomic DNA
tctgagactgcccgccatgccat

SEQ ID NO: 3894 - DNA, 23 bp, Homo sapiens
  source 1..23: mol_type = genomic DNA
ctgagactgcccgccatgccatt

SEQ ID NO: 3895 - DNA, 23 bp, Homo sapiens
  source 1..23: mol_type = genomic DNA
tgagactgcccgccatgccattc

SEQ ID NO: 3896 - DNA, 23 bp, Homo sapiens
  source 1..23: mol_type = genomic DNA
gagactgcccgccatgccattcc

SEQ ID NO: 3897 - DNA, 23 bp, Homo sapiens
  source 1..23: mol_type = genomic DNA
agactgcccgccatgccattccc

SEQ ID NO: 3898 - DNA, 23 bp, Homo sapiens
  source 1..23: mol_type = genomic DNA
gactgcccgccatgccattccct

SEQ ID NO: 3899 - DNA, 23 bp, Homo sapiens
  source 1..23: mol_type = genomic DNA
actgcccgccatgccattccctt

SEQ ID NO: 3900 - DNA, 23 bp, Homo sapiens
  source 1..23: mol_type = genomic DNA
ctgcccgccatgccattcccttt

SEQ ID NO: 3901 - DNA, 23 bp, Homo sapiens
  source 1..23: mol_type = genomic DNA
tgcccgccatgccattcccttta

SEQ ID NO: 3902 - DNA, 23 bp, Homo sapiens
  source 1..23: mol_type = genomic DNA
gcccgccatgccattccctttac

SEQ ID NO: 3903 - DNA, 23 bp, Homo sapiens
  source 1..23: mol_type = genomic DNA
cccgccatgccattccctttacc

SEQ ID NO: 3904 - DNA, 23 bp, Homo sapiens
  source 1..23: mol_type = genomic DNA
ccgccatgccattccctttacct

SEQ ID NO: 3905 - DNA, 23 bp, Homo sapiens
  source 1..23: mol_type = genomic DNA
cgccatgccattccctttacctg

SEQ ID NO: 3906 - DNA, 23 bp, Homo sapiens
  source 1..23: mol_type = genomic DNA
gccatgccattccctttacctgg

SEQ ID NO: 3907 - DNA, 23 bp, Homo sapiens
  source 1..23: mol_type = genomic DNA
ccatgccattccctttacctgga

SEQ ID NO: 3908 - DNA, 23 bp, Homo sapiens
  source 1..23: mol_type = genomic DNA
catgccattccctttacctggaa

SEQ ID NO: 3909 - DNA, 23 bp, Homo sapiens
  source 1..23: mol_type = genomic DNA
atgccattccctttacctggaaa

SEQ ID NO: 3910 - DNA, 23 bp, Homo sapiens
  source 1..23: mol_type = genomic DNA
tgccattccctttacctggaaaa

SEQ ID NO: 3911 - DNA, 23 bp, Homo sapiens
  source 1..23: mol_type = genomic DNA
gccattccctttacctggaaaac

SEQ ID NO: 3912 - DNA, 23 bp, Homo sapiens
  source 1..23: mol_type = genomic DNA
ccattccctttacctggaaaact

SEQ ID NO: 3913 - DNA, 23 bp, Homo sapiens
  source 1..23: mol_type = genomic DNA
cattccctttacctggaaaactc

SEQ ID NO: 3914 - DNA, 23 bp, Homo sapiens
  source 1..23: mol_type = genomic DNA
attccctttacctggaaaactcc

SEQ ID NO: 3915 - DNA, 23 bp, Homo sapiens
  source 1..23: mol_type = genomic DNA
ttccctttacctggaaaactcct

SEQ ID NO: 3916 - DNA, 23 bp, Homo sapiens
  source 1..23: mol_type = genomic DNA
tccctttacctggaaaactcctc

SEQ ID NO: 3917 - DNA, 23 bp, Homo sapiens
  source 1..23: mol_type = genomic DNA
ccctttacctggaaaactcctcc

SEQ ID NO: 3918 - DNA, 23 bp, Homo sapiens
  source 1..23: mol_type = genomic DNA
cctttacctggaaaactcctccc

SEQ ID NO: 3919 - DNA, 23 bp, Homo sapiens
  source 1..23: mol_type = genomic DNA
ctttacctggaaaactcctccct

SEQ ID NO: 3920 - DNA, 23 bp, Homo sapiens
  source 1..23: mol_type = genomic DNA
tttacctggaaaactcctcccta

SEQ ID NO: 3921 - DNA, 23 bp, Homo sapiens
  source 1..23: mol_type = genomic DNA
ttacctggaaaactcctccctat

SEQ ID NO: 3922 - DNA, 23 bp, Homo sapiens
  source 1..23: mol_type = genomic DNA
tacctggaaaactcctccctatc

SEQ ID NO: 3923 - DNA, 23 bp, Homo sapiens
  source 1..23: mol_type = genomic DNA
acctggaaaactcctccctatcc

SEQ ID NO: 3924 - DNA, 23 bp, Homo sapiens
  source 1..23: mol_type = genomic DNA
cctggaaaactcctccctatcca

SEQ ID NO: 3925 - DNA, 23 bp, Homo sapiens
  source 1..23: mol_type = genomic DNA
ctggaaaactcctccctatccat

SEQ ID NO: 3926 - DNA, 23 bp, Homo sapiens
  source 1..23: mol_type = genomic DNA
tggaaaactcctccctatccatc

SEQ ID NO: 3927 - DNA, 23 bp, Homo sapiens
  source 1..23: mol_type = genomic DNA
ggaaaactcctccctatccatca

SEQ ID NO: 3928 - DNA, 23 bp, Homo sapiens
  source 1..23: mol_type = genomic DNA
gaaaactcctccctatccatcaa

SEQ ID NO: 3929 - DNA, 23 bp, Homo sapiens
  source 1..23: mol_type = genomic DNA
aaaactcctccctatccatcaaa

SEQ ID NO: 3930 - DNA, 23 bp, Homo sapiens
  source 1..23: mol_type = genomic DNA
aaactcctccctatccatcaaag

SEQ ID NO: 3931 - DNA, 23 bp, Homo sapiens
  source 1..23: mol_type = genomic DNA
aactcctccctatccatcaaagt

SEQ ID NO: 3932 - DNA, 23 bp, Homo sapiens
  source 1..23: mol_type = genomic DNA
actcctccctatccatcaaagtc

SEQ ID NO: 3933 - DNA, 23 bp, Homo sapiens
  source 1..23: mol_type = genomic DNA
ctcctccctatccatcaaagtcc

SEQ ID NO: 3934 - DNA, 23 bp, Homo sapiens
  source 1..23: mol_type = genomic DNA
tcctccctatccatcaaagtcca

SEQ ID NO: 3935 - DNA, 23 bp, Homo sapiens
  source 1..23: mol_type = genomic DNA
cctccctatccatcaaagtccag

SEQ ID NO: 3936 - DNA, 23 bp, Homo sapiens
  source 1..23: mol_type = genomic DNA
ctccctatccatcaaagtccaga

SEQ ID NO: 3937 - DNA, 23 bp, Homo sapiens
  source 1..23: mol_type = genomic DNA
tccctatccatcaaagtccagat

SEQ ID NO: 3938 - DNA, 23 bp, Homo sapiens
  source 1..23: mol_type = genomic DNA
ccctatccatcaaagtccagatt

SEQ ID NO: 3939 - DNA, 23 bp, Homo sapiens
  source 1..23: mol_type = genomic DNA
cctatccatcaaagtccagattc

SEQ ID NO: 3940 - DNA, 23 bp, Homo sapiens
  source 1..23: mol_type = genomic DNA
ctatccatcaaagtccagattca

SEQ ID NO: 3941 - DNA, 23 bp, Homo sapiens
  source 1..23: mol_type = genomic DNA
tatccatcaaagtccagattcag

SEQ ID NO: 3942 - DNA, 23 bp, Homo sapiens
  source 1..23: mol_type = genomic DNA
atccatcaaagtccagattcagg

SEQ ID NO: 3943 - DNA, 23 bp, Homo sapiens
  source 1..23: mol_type = genomic DNA
tccatcaaagtccagattcaggg

SEQ ID NO: 3944 - DNA, 23 bp, Homo sapiens
  source 1..23: mol_type = genomic DNA
ccatcaaagtccagattcagggt

SEQ ID NO: 3945 - DNA, 23 bp, Homo sapiens
  source 1..23: mol_type = genomic DNA
catcaaagtccagattcagggtc

SEQ ID NO: 3946 - DNA, 23 bp, Homo sapiens
  source 1..23: mol_type = genomic DNA
atcaaagtccagattcagggtca

SEQ ID NO: 3947 - DNA, 23 bp, Homo sapiens
  source 1..23: mol_type = genomic DNA
tcaaagtccagattcagggtcac

SEQ ID NO: 3948 - DNA, 23 bp, Homo sapiens
  source 1..23: mol_type = genomic DNA
caaagtccagattcagggtcacc

SEQ ID NO: 3949 - DNA, 23 bp, Homo sapiens
  source 1..23: mol_type = genomic DNA
aaagtccagattcagggtcacct

SEQ ID NO: 3950 - DNA, 23 bp, Homo sapiens
  source 1..23: mol_type = genomic DNA
aagtccagattcagggtcacctc

SEQ ID NO: 3951 - DNA, 23 bp, Homo sapiens
  source 1..23: mol_type = genomic DNA
agtccagattcagggtcacctcc

SEQ ID NO: 3952 - DNA, 23 bp, Homo sapiens
  source 1..23: mol_type = genomic DNA
gtccagattcagggtcacctcct

SEQ ID NO: 3953 - DNA, 23 bp, Homo sapiens
  source 1..23: mol_type = genomic DNA
tccagattcagggtcacctcctc

SEQ ID NO: 3954 - DNA, 23 bp, Homo sapiens
  source 1..23: mol_type = genomic DNA
ccagattcagggtcacctcctct

SEQ ID NO: 3955 - DNA, 23 bp, Homo sapiens
  source 1..23: mol_type = genomic DNA
cagattcagggtcacctcctctg

SEQ ID NO: 3956 - DNA, 23 bp, Homo sapiens
  source 1..23: mol_type = genomic DNA
agattcagggtcacctcctctgg

SEQ ID NO: 3957 - DNA, 23 bp, Homo sapiens
  source 1..23: mol_type = genomic DNA
gattcagggtcacctcctctggg

SEQ ID NO: 3958 - DNA, 23 bp, Homo sapiens
  source 1..23: mol_type = genomic DNA
attcagggtcacctcctctggga

SEQ ID NO: 3959 - DNA, 23 bp, Homo sapiens
  source 1..23: mol_type = genomic DNA
ttcagggtcacctcctctgggaa

SEQ ID NO: 3960 - DNA, 23 bp, Homo sapiens
  source 1..23: mol_type = genomic DNA
tcagggtcacctcctctgggaag

SEQ ID NO: 3961 - DNA, 23 bp, Homo sapiens
  source 1..23: mol_type = genomic DNA
cagggtcacctcctctgggaagc

SEQ ID NO: 3962 - DNA, 23 bp, Homo sapiens
  source 1..23: mol_type = genomic DNA
agggtcacctcctctgggaagcc

SEQ ID NO: 3963 - DNA, 23 bp, Homo sapiens
  source 1..23: mol_type = genomic DNA
gggtcacctcctctgggaagccc

SEQ ID NO: 3964 - DNA, 23 bp, Homo sapiens
  source 1..23: mol_type = genomic DNA
ggtcacctcctctgggaagccca

SEQ ID NO: 3965 - DNA, 23 bp, Homo sapiens
  source 1..23: mol_type = genomic DNA
gtcacctcctctgggaagcccac

SEQ ID NO: 3966 - DNA, 23 bp, Homo sapiens
  source 1..23: mol_type = genomic DNA
tcacctcctctgggaagcccacc

SEQ ID NO: 3967 - DNA, 23 bp, Homo sapiens
  source 1..23: mol_type = genomic DNA
cacctcctctgggaagcccacct

SEQ ID NO: 3968 - DNA, 23 bp, Homo sapiens
  source 1..23: mol_type = genomic DNA
acctcctctgggaagcccacctt

SEQ ID NO: 3969 - DNA, 23 bp, Homo sapiens
  source 1..23: mol_type = genomic DNA
cctcctctgggaagcccaccttg

SEQ ID NO: 3970 - DNA, 23 bp, Homo sapiens
  source 1..23: mol_type = genomic DNA
ctcctctgggaagcccaccttgg

SEQ ID NO: 3971 - DNA, 23 bp, Homo sapiens
  source 1..23: mol_type = genomic DNA
tcctctgggaagcccaccttggc

SEQ ID NO: 3972 - DNA, 23 bp, Homo sapiens
  source 1..23: mol_type = genomic DNA
cctctgggaagcccaccttggcc

SEQ ID NO: 3973 - DNA, 23 bp, Homo sapiens
  source 1..23: mol_type = genomic DNA
ctctgggaagcccaccttggcct

SEQ ID NO: 3974 - DNA, 23 bp, Homo sapiens
  source 1..23: mol_type = genomic DNA
tctgggaagcccaccttggcctc

SEQ ID NO: 3975 - DNA, 23 bp, Homo sapiens
  source 1..23: mol_type = genomic DNA
ctgggaagcccaccttggcctcc

SEQ ID NO: 3976 - DNA, 23 bp, Homo sapiens
  source 1..23: mol_type = genomic DNA
tgggaagcccaccttggcctcca

SEQ ID NO: 3977 - DNA, 23 bp, Homo sapiens
  source 1..23: mol_type = genomic DNA
gggaagcccaccttggcctccag

SEQ ID NO: 3978 - DNA, 23 bp, Homo sapiens
  source 1..23: mol_type = genomic DNA
ggaagcccaccttggcctccagg

SEQ ID NO: 3979 - DNA, 23 bp, Homo sapiens
  source 1..23: mol_type = genomic DNA
gaagcccaccttggcctccaggt

SEQ ID NO: 3980 - DNA, 23 bp, Homo sapiens
  source 1..23: mol_type = genomic DNA
aagcccaccttggcctccaggtt

SEQ ID NO: 3981 - DNA, 23 bp, Homo sapiens
  source 1..23: mol_type = genomic DNA
agcccaccttggcctccaggttg

SEQ ID NO: 3982 - DNA, 23 bp, Homo sapiens
  source 1..23: mol_type = genomic DNA
gcccaccttggcctccaggttga

SEQ ID NO: 3983 - DNA, 23 bp, Homo sapiens
  source 1..23: mol_type = genomic DNA
cccaccttggcctccaggttgac

SEQ ID NO: 3984 - DNA, 23 bp, Homo sapiens
  source 1..23: mol_type = genomic DNA
ccaccttggcctccaggttgact

SEQ ID NO: 3985 - DNA, 23 bp, Homo sapiens
  source 1..23: mol_type = genomic DNA
caccttggcctccaggttgactc

SEQ ID NO: 3986 - DNA, 23 bp, Homo sapiens
  source 1..23: mol_type = genomic DNA
accttggcctccaggttgactct

SEQ ID NO: 3987 - DNA, 23 bp, Homo sapiens
  source 1..23: mol_type = genomic DNA
ccttggcctccaggttgactctc

SEQ ID NO: 3988 - DNA, 23 bp, Homo sapiens
  source 1..23: mol_type = genomic DNA
cttggcctccaggttgactctca

SEQ ID NO: 3989 - DNA, 23 bp, Homo sapiens
  source 1..23: mol_type = genomic DNA
ttggcctccaggttgactctcac

SEQ ID NO: 3990 - DNA, 23 bp, Homo sapiens
  source 1..23: mol_type = genomic DNA
tggcctccaggttgactctcact

SEQ ID NO: 3991 - DNA, 23 bp, Homo sapiens
  source 1..23: mol_type = genomic DNA
ggcctccaggttgactctcacta

SEQ ID NO: 3992 - DNA, 23 bp, Homo sapiens
  source 1..23: mol_type = genomic DNA
gcctccaggttgactctcactac

SEQ ID NO: 3993 - DNA, 23 bp, Homo sapiens
  source 1..23: mol_type = genomic DNA
cctccaggttgactctcactact

SEQ ID NO: 3994 - DNA, 23 bp, Homo sapiens
  source 1..23: mol_type = genomic DNA
ctccaggttgactctcactactc

SEQ ID NO: 3995 - DNA, 23 bp, Homo sapiens
  source 1..23: mol_type = genomic DNA
tccaggttgactctcactactca

SEQ ID NO: 3996 - DNA, 23 bp, Homo sapiens
  source 1..23: mol_type = genomic DNA
ccaggttgactctcactactcat

SEQ ID NO: 3997 - DNA, 23 bp, Homo sapiens
  source 1..23: mol_type = genomic DNA
caggttgactctcactactcatc

SEQ ID NO: 3998 - DNA, 23 bp, Homo sapiens
  source 1..23: mol_type = genomic DNA
aggttgactctcactactcatca

SEQ ID NO: 3999 - DNA, 23 bp, Homo sapiens
  source 1..23: mol_type = genomic DNA
ggttgactctcactactcatcat

SEQ ID NO: 4000 - DNA, 23 bp, Homo sapiens
  source 1..23: mol_type = genomic DNA
gttgactctcactactcatcatc

SEQ ID NO: 4001 - DNA, 23 bp, Homo sapiens
  source 1..23: mol_type = genomic DNA
ttgactctcactactcatcatca

SEQ ID NO: 4002 - DNA, 23 bp, Homo sapiens
  source 1..23: mol_type = genomic DNA
tgactctcactactcatcatcag

SEQ ID NO: 4003 - DNA, 23 bp, Homo sapiens
  source 1..23: mol_type = genomic DNA
gactctcactactcatcatcagg

SEQ ID NO: 4004 - DNA, 23 bp, Homo sapiens
  source 1..23: mol_type = genomic DNA
actctcactactcatcatcaggt

SEQ ID NO: 4005 - DNA, 23 bp, Homo sapiens
  source 1..23: mol_type = genomic DNA
ctctcactactcatcatcaggtt

SEQ ID NO: 4006 - DNA, 23 bp, Homo sapiens
  source 1..23: mol_type = genomic DNA
tctcactactcatcatcaggttc

SEQ ID NO: 4007 - DNA, 23 bp, Homo sapiens
  source 1..23: mol_type = genomic DNA
ctcactactcatcatcaggttct

SEQ ID NO: 4008 - DNA, 23 bp, Homo sapiens
  source 1..23: mol_type = genomic DNA
tcactactcatcatcaggttctt

SEQ ID NO: 4009 - DNA, 23 bp, Homo sapiens
  source 1..23: mol_type = genomic DNA
cactactcatcatcaggttcttc

SEQ ID NO: 4010 - DNA, 23 bp, Homo sapiens
  source 1..23: mol_type = genomic DNA
actactcatcatcaggttcttcc

SEQ ID NO: 4011 - DNA, 23 bp, Homo sapiens
  source 1..23: mol_type = genomic DNA
ctactcatcatcaggttcttcct

SEQ ID NO: 4012 - DNA, 23 bp, Homo sapiens
  source 1..23: mol_type = genomic DNA
tactcatcatcaggttcttcctt

SEQ ID NO: 4013 - DNA, 23 bp, Homo sapiens
  source 1..23: mol_type = genomic DNA
actcatcatcaggttcttccttc

SEQ ID NO: 4014 - DNA, 23 bp, Homo sapiens
  source 1..23: mol_type = genomic DNA
ctcatcatcaggttcttccttct

SEQ ID NO: 4015 - DNA, 23 bp, Homo sapiens
  source 1..23: mol_type = genomic DNA
tcatcatcaggttcttccttcta

SEQ ID NO: 4016 - DNA, 23 bp, Homo sapiens
  source 1..23: mol_type = genomic DNA
catcatcaggttcttccttctat

SEQ ID NO: 4017 - DNA, 23 bp, Homo sapiens
  source 1..23: mol_type = genomic DNA
atcatcaggttcttccttctatt

SEQ ID NO: 4018 - DNA, 23 bp, Homo sapiens
  source 1..23: mol_type = genomic DNA
tcatcaggttcttccttctattc

SEQ ID NO: 4019 - DNA, 23 bp, Homo sapiens
  source 1..23: mol_type = genomic DNA
catcaggttcttccttctattcc

SEQ ID NO: 4020 - DNA, 23 bp, Homo sapiens
  source 1..23: mol_type = genomic DNA
atcaggttcttccttctattcca

SEQ ID NO: 4021 - DNA, 23 bp, Homo sapiens
  source 1..23: mol_type = genomic DNA
tcaggttcttccttctattccag

SEQ ID NO: 4022 - DNA, 23 bp, Homo sapiens
  source 1..23: mol_type = genomic DNA
caggttcttccttctattccagc

SEQ ID NO: 4023 - DNA, 23 bp, Homo sapiens
  source 1..23: mol_type = genomic DNA
aggttcttccttctattccagcc

SEQ ID NO: 4024 - DNA, 23 bp, Homo sapiens
  source 1..23: mol_type = genomic DNA
ggttcttccttctattccagccc

SEQ ID NO: 4025 - DNA, 23 bp, Homo sapiens
  source 1..23: mol_type = genomic DNA
gttcttccttctattccagccct

SEQ ID NO: 4026 - DNA, 23 bp, Homo sapiens
  source 1..23: mol_type = genomic DNA
ttcttccttctattccagcccta

SEQ ID NO: 4027 - DNA, 23 bp, Homo sapiens
  source 1..23: mol_type = genomic DNA
tcttccttctattccagccctaa

SEQ ID NO: 4028 - DNA, 23 bp, Homo sapiens
  source 1..23: mol_type = genomic DNA
cttccttctattccagccctaac

SEQ ID NO: 4029 - DNA, 23 bp, Homo sapiens
  source 1..23: mol_type = genomic DNA
ttccttctattccagccctaacc

SEQ ID NO: 4030 - DNA, 23 bp, Homo sapiens
  source 1..23: mol_type = genomic DNA
tccttctattccagccctaacca

SEQ ID NO: 4031 - DNA, 23 bp, Homo sapiens
  source 1..23: mol_type = genomic DNA
ccttctattccagccctaaccac

SEQ ID NO: 4032 - DNA, 23 bp, Homo sapiens
  source 1..23: mol_type = genomic DNA
cttctattccagccctaaccact

SEQ ID NO: 4033 - DNA, 23 bp, Homo sapiens
  source 1..23: mol_type = genomic DNA
ttctattccagccctaaccactc

SEQ ID NO: 4034 - DNA, 23 bp, Homo sapiens
  source 1..23: mol_type = genomic DNA
tctattccagccctaaccactca

SEQ ID NO: 4035 - DNA, 23 bp, Homo sapiens
  source 1..23: mol_type = genomic DNA
ctattccagccctaaccactcag

SEQ ID NO: 4036 - DNA, 23 bp, Homo sapiens
  source 1..23: mol_type = genomic DNA
tattccagccctaaccactcagg

SEQ ID NO: 4037 - DNA, 23 bp, Homo sapiens
  source 1..23: mol_type = genomic DNA
attccagccctaaccactcagga

SEQ ID NO: 4038 - DNA, 23 bp, Homo sapiens
  source 1..23: mol_type = genomic DNA
ttccagccctaaccactcaggat

SEQ ID NO: 4039 - DNA, 23 bp, Homo sapiens
  source 1..23: mol_type = genomic DNA
tccagccctaaccactcaggatt

SEQ ID NO: 4040 - DNA, 23 bp, Homo sapiens
  source 1..23: mol_type = genomic DNA
ccagccctaaccactcaggattg

SEQ ID NO: 4041 - DNA, 23 bp, Homo sapiens
  source 1..23: mol_type = genomic DNA
cagccctaaccactcaggattgg

SEQ ID NO: 4042 - DNA, 23 bp, Homo sapiens
  source 1..23: mol_type = genomic DNA
agccctaaccactcaggattggg

SEQ ID NO: 4043 - DNA, 23 bp, Homo sapiens
  source 1..23: mol_type = genomic DNA
gccctaaccactcaggattgggc

SEQ ID NO: 4044 - DNA, 23 bp, Homo sapiens
  source 1..23: mol_type = genomic DNA
ccctaaccactcaggattgggcc

SEQ ID NO: 4045 - DNA, 23 bp, Homo sapiens
  source 1..23: mol_type = genomic DNA
cctaaccactcaggattgggccg

SEQ ID NO: 4046 - DNA, 23 bp, Homo sapiens
  source 1..23: mol_type = genomic DNA
ctaaccactcaggattgggccgt

SEQ ID NO: 4047 - DNA, 23 bp, Homo sapiens
  source 1..23: mol_type = genomic DNA
taaccactcaggattgggccgtt

SEQ ID NO: 4048 - DNA, 23 bp, Homo sapiens
  source 1..23: mol_type = genomic DNA
aaccactcaggattgggccgttt

SEQ ID NO: 4049 - DNA, 23 bp, Homo sapiens
  source 1..23: mol_type = genomic DNA
accactcaggattgggccgtttg

SEQ ID NO: 4050 - DNA, 23 bp, Homo sapiens
  source 1..23: mol_type = genomic DNA
ccactcaggattgggccgtttgt

SEQ ID NO: 4051 - DNA, 23 bp, Homo sapiens
  source 1..23: mol_type = genomic DNA
cactcaggattgggccgtttgtg

SEQ ID NO: 4052 - DNA, 23 bp, Homo sapiens
  source 1..23: mol_type = genomic DNA
actcaggattgggccgtttgtgt

SEQ ID NO: 4053 - DNA, 23 bp, Homo sapiens
  source 1..23: mol_type = genomic DNA
ctcaggattgggccgtttgtgtc

SEQ ID NO: 4054 - DNA, 23 bp, Homo sapiens
  source 1..23: mol_type = genomic DNA
tcaggattgggccgtttgtgtct

SEQ ID NO: 4055 - DNA, 23 bp, Homo sapiens
  source 1..23: mol_type = genomic DNA
caggattgggccgtttgtgtctg

SEQ ID NO: 4056 - DNA, 23 bp, Homo sapiens
  source 1..23: mol_type = genomic DNA
aggattgggccgtttgtgtctgg

SEQ ID NO: 4057 - DNA, 23 bp, Homo sapiens
  source 1..23: mol_type = genomic DNA
ggattgggccgtttgtgtctggg

SEQ ID NO: 4058 - DNA, 23 bp, Homo sapiens
  source 1..23: mol_type = genomic DNA
gattgggccgtttgtgtctgggt

SEQ ID NO: 4059 - DNA, 23 bp, Homo sapiens
  source 1..23: mol_type = genomic DNA
attgggccgtttgtgtctgggta

SEQ ID NO: 4060 - DNA, 23 bp, Homo sapiens
  source 1..23: mol_type = genomic DNA
ttgggccgtttgtgtctgggtat

SEQ ID NO: 4061 - DNA, 23 bp, Homo sapiens
  source 1..23: mol_type = genomic DNA
tgggccgtttgtgtctgggtatg

SEQ ID NO: 4062 - DNA, 23 bp, Homo sapiens
  source 1..23: mol_type = genomic DNA
gggccgtttgtgtctgggtatgt

SEQ ID NO: 4063 - DNA, 23 bp, Homo sapiens
  source 1..23: mol_type = genomic DNA
ggccgtttgtgtctgggtatgtc

SEQ ID NO: 4064 - DNA, 23 bp, Homo sapiens
  source 1..23: mol_type = genomic DNA
gccgtttgtgtctgggtatgtct

SEQ ID NO: 4065 - DNA, 23 bp, Homo sapiens
  source 1..23: mol_type = genomic DNA
ccgtttgtgtctgggtatgtctc

SEQ ID NO: 4066 - DNA, 23 bp, Homo sapiens
  source 1..23: mol_type = genomic DNA
cgtttgtgtctgggtatgtctct

SEQ ID NO: 4067 - DNA, 23 bp, Homo sapiens
  source 1..23: mol_type = genomic DNA
gtttgtgtctgggtatgtctctt

SEQ ID NO: 4068 - DNA, 23 bp, Homo sapiens
  source 1..23: mol_type = genomic DNA
tttgtgtctgggtatgtctcttc

SEQ ID NO: 4069 - DNA, 23 bp, Homo sapiens
  source 1..23: mol_type = genomic DNA
ttgtgtctgggtatgtctcttcc

SEQ ID NO: 4070 - DNA, 23 bp, Homo sapiens
  source 1..23: mol_type = genomic DNA
tgtgtctgggtatgtctcttcca

SEQ ID NO: 4071 - DNA, 23 bp, Homo sapiens
  source 1..23: mol_type = genomic DNA
gtgtctgggtatgtctcttccag

SEQ ID NO: 4072 - DNA, 23 bp, Homo sapiens
  source 1..23: mol_type = genomic DNA
tgtctgggtatgtctcttccagc

SEQ ID NO: 4073 - DNA, 23 bp, Homo sapiens
  source 1..23: mol_type = genomic DNA
gtctgggtatgtctcttccagct

SEQ ID NO: 4074 - DNA, 23 bp, Homo sapiens
  source 1..23: mol_type = genomic DNA
tctgggtatgtctcttccagctg

SEQ ID NO: 4075 - DNA, 23 bp, Homo sapiens
  source 1..23: mol_type = genomic DNA
ctgggtatgtctcttccagctgc

SEQ ID NO: 4076 - DNA, 23 bp, Homo sapiens
  source 1..23: mol_type = genomic DNA
tgggtatgtctcttccagctgcc

SEQ ID NO: 4077 - DNA, 23 bp, Homo sapiens
  source 1..23: mol_type = genomic DNA
gggtatgtctcttccagctgcct

SEQ ID NO: 4078 - DNA, 23 bp, Homo sapiens
  source 1..23: mol_type = genomic DNA
ggtatgtctcttccagctgcctg

SEQ ID NO: 4079 - DNA, 23 bp, Homo sapiens
  source 1..23: mol_type = genomic DNA
gtatgtctcttccagctgcctgg

SEQ ID NO: 4080 - DNA, 23 bp, Homo sapiens
  source 1..23: mol_type = genomic DNA
tatgtctcttccagctgcctggg

SEQ ID NO: 4081 - DNA, 23 bp, Homo sapiens
  source 1..23: mol_type = genomic DNA
atgtctcttccagctgcctgggt

SEQ ID NO: 4082 - DNA, 23 bp, Homo sapiens
  source 1..23: mol_type = genomic DNA
tgtctcttccagctgcctgggtt

SEQ ID NO: 4083 - DNA, 23 bp, Homo sapiens
  source 1..23: mol_type = genomic DNA
gtctcttccagctgcctgggttt

SEQ ID NO: 4084 - DNA, 23 bp, Homo sapiens
  source 1..23: mol_type = genomic DNA
tctcttccagctgcctgggtttc

SEQ ID NO: 4085 - DNA, 23 bp, Homo sapiens
  source 1..23: mol_type = genomic DNA
ctcttccagctgcctgggtttcc

SEQ ID NO: 4086 - DNA, 23 bp, Homo sapiens
  source 1..23: mol_type = genomic DNA
tcttccagctgcctgggtttcct

SEQ ID NO: 4087 - DNA, 23 bp, Homo sapiens
  source 1..23: mol_type = genomic DNA
cttccagctgcctgggtttcctg

SEQ ID NO: 4088 - DNA, 23 bp, Homo sapiens
  source 1..23: mol_type = genomic DNA
ttccagctgcctgggtttcctgg

SEQ ID NO: 4089 - DNA, 23 bp, Homo sapiens
  source 1..23: mol_type = genomic DNA
tccagctgcctgggtttcctgga

SEQ ID NO: 4090 - DNA, 23 bp, Homo sapiens
  source 1..23: mol_type = genomic DNA
ccagctgcctgggtttcctggaa

SEQ ID NO: 4091 - DNA, 23 bp, Homo sapiens
  source 1..23: mol_type = genomic DNA
cagctgcctgggtttcctggaaa

SEQ ID NO: 4092 - DNA, 23 bp, Homo sapiens
  source 1..23: mol_type = genomic DNA
agctgcctgggtttcctggaaag

SEQ ID NO: 4093 - DNA, 23 bp, Homo sapiens
  source 1..23: mol_type = genomic DNA
gctgcctgggtttcctggaaaga

SEQ ID NO: 4094 - DNA, 23 bp, Homo sapiens
  source 1..23: mol_type = genomic DNA
ctgcctgggtttcctggaaagaa

SEQ ID NO: 4095 - DNA, 23 bp, Homo sapiens
  source 1..23: mol_type = genomic DNA
tgcctgggtttcctggaaagaac

SEQ ID NO: 4096 - DNA, 23 bp, Homo sapiens
  source 1..23: mol_type = genomic DNA
gcctgggtttcctggaaagaact

SEQ ID NO: 4097 - DNA, 23 bp, Homo sapiens
  source 1..23: mol_type = genomic DNA
cctgggtttcctggaaagaactc

SEQ ID NO: 4098 - DNA, 23 bp, Homo sapiens
  source 1..23: mol_type = genomic DNA
ctgggtttcctggaaagaactct

SEQ ID NO: 4099 - DNA, 23 bp, Homo sapiens
  source 1..23: mol_type = genomic DNA
tgggtttcctggaaagaactctt

SEQ ID NO: 4100 - DNA, 23 bp, Homo sapiens
  source 1..23: mol_type = genomic DNA
gggtttcctggaaagaactctta

SEQ ID NO: 4101 - DNA, 23 bp, Homo sapiens
  source 1..23: mol_type = genomic DNA
ggtttcctggaaagaactcttat

SEQ ID NO: 4102 - DNA, 23 bp, Homo sapiens
  source 1..23: mol_type = genomic DNA
gtttcctggaaagaactcttatc

SEQ ID NO: 4103 - DNA, 23 bp, Homo sapiens
  source 1..23: mol_type = genomic DNA
tttcctggaaagaactcttatcc

SEQ ID NO: 4104 - DNA, 23 bp, Homo sapiens
  source 1..23: mol_type = genomic DNA
ttcctggaaagaactcttatccc

SEQ ID NO: 4105 - DNA, 23 bp, Homo sapiens
  source 1..23: mol_type = genomic DNA
tcctggaaagaactcttatcccc

SEQ ID NO: 4106 - DNA, 23 bp, Homo sapiens
  source 1..23: mol_type = genomic DNA
cctggaaagaactcttatcccca

SEQ ID NO: 4107 - DNA, 23 bp, Homo sapiens
  source 1..23: mol_type = genomic DNA
ctggaaagaactcttatccccag

SEQ ID NO: 4108 - DNA, 23 bp, Homo sapiens
  source 1..23: mol_type = genomic DNA
tggaaagaactcttatccccagg

SEQ ID NO: 4109 - DNA, 23 bp, Homo sapiens
  source 1..23: mol_type = genomic DNA
ggaaagaactcttatccccagga

SEQ ID NO: 4110 - DNA, 23 bp, Homo sapiens
  source 1..23: mol_type = genomic DNA
gaaagaactcttatccccaggaa

SEQ ID NO: 4111 - DNA, 23 bp, Homo sapiens
  source 1..23: mol_type = genomic DNA
aaagaactcttatccccaggaac

SEQ ID NO: 4112 - DNA, 23 bp, Homo sapiens
  source 1..23: mol_type = genomic DNA
aagaactcttatccccaggaact

SEQ ID NO: 4113 - DNA, 23 bp, Homo sapiens
  source 1..23: mol_type = genomic DNA
agaactcttatccccaggaacta

SEQ ID NO: 4114 - DNA, 23 bp, Homo sapiens
  source 1..23: mol_type = genomic DNA
gaactcttatccccaggaactag

SEQ ID NO: 4115 - DNA, 23 bp, Homo sapiens
  source 1..23: mol_type = genomic DNA
aactcttatccccaggaactagt

SEQ ID NO: 4116 - DNA, 23 bp, Homo sapiens
  source 1..23: mol_type = genomic DNA
actcttatccccaggaactagtt

SEQ ID NO: 4117 - DNA, 23 bp, Homo sapiens
  source 1..23: mol_type = genomic DNA
ctcttatccccaggaactagttt

SEQ ID NO: 4118 - DNA, 23 bp, Homo sapiens
  source 1..23: mol_type = genomic DNA
tcttatccccaggaactagtttg

SEQ ID NO: 4119 - DNA, 23 bp, Homo sapiens
  source 1..23: mol_type = genomic DNA
cttatccccaggaactagtttgt

SEQ ID NO: 4120 - DNA, 23 bp, Homo sapiens
  source 1..23: mol_type = genomic DNA
ttatccccaggaactagtttgtt

SEQ ID NO: 4121 - DNA, 23 bp, Homo sapiens
  source 1..23: mol_type = genomic DNA
tatccccaggaactagtttgttg

SEQ ID NO: 4122 - DNA, 23 bp, Homo sapiens
  source 1..23: mol_type = genomic DNA
atccccaggaactagtttgttga

SEQ ID NO: 4123 - DNA, 23 bp, Homo sapiens
  source 1..23: mol_type = genomic DNA
tccccaggaactagtttgttgaa

SEQ ID NO: 4124 - DNA, 23 bp, Homo sapiens
  source 1..23: mol_type = genomic DNA
ccccaggaactagtttgttgaat

SEQ ID NO: 4125 - DNA, 23 bp, Homo sapiens
  source 1..23: mol_type = genomic DNA
cccaggaactagtttgttgaata

SEQ ID NO: 4126 - DNA, 23 bp, Homo sapiens
  source 1..23: mol_type = genomic DNA
ccaggaactagtttgttgaataa

SEQ ID NO: 4127 - DNA, 23 bp, Homo sapiens
  source 1..23: mol_type = genomic DNA
caggaactagtttgttgaataaa

SEQ ID NO: 4128 - DNA, 23 bp, Homo sapiens
  source 1..23: mol_type = genomic DNA
aggaactagtttgttgaataaat

SEQ ID NO: 4129 - DNA, 23 bp, Homo sapiens
  source 1..23: mol_type = genomic DNA
ggaactagtttgttgaataaatg

SEQ ID NO: 4130 - DNA, 23 bp, Homo sapiens
  source 1..23: mol_type = genomic DNA
gaactagtttgttgaataaatgc

SEQ ID NO: 4131 - DNA, 23 bp, Homo sapiens
  source 1..23: mol_type = genomic DNA
aactagtttgttgaataaatgct

SEQ ID NO: 4132 - DNA, 23 bp, Homo sapiens
  source 1..23: mol_type = genomic DNA
actagtttgttgaataaatgctg

SEQ ID NO: 4133 - DNA, 23 bp, Homo sapiens
  source 1..23: mol_type = genomic DNA
ctagtttgttgaataaatgctgg

SEQ ID NO: 4134 - DNA, 23 bp, Homo sapiens
  source 1..23: mol_type = genomic DNA
tagtttgttgaataaatgctggt

SEQ ID NO: 4135 - DNA, 23 bp, Homo sapiens
  source 1..23: mol_type = genomic DNA
agtttgttgaataaatgctggtg

SEQ ID NO: 4136 - DNA, 23 bp, Homo sapiens
  source 1..23: mol_type = genomic DNA
gtttgttgaataaatgctggtga

SEQ ID NO: 4137 - DNA, 23 bp, Homo sapiens
  source 1..23: mol_type = genomic DNA
tttgttgaataaatgctggtgaa

SEQ ID NO: 4138 - DNA, 23 bp, Homo sapiens
  source 1..23: mol_type = genomic DNA
ttgttgaataaatgctggtgaat

SEQ ID NO: 4139 - DNA, 23 bp, Homo sapiens
  source 1..23: mol_type = genomic DNA
tgttgaataaatgctggtgaatg

SEQ ID NO: 4140 - DNA, 23 bp, Homo sapiens
  source 1..23: mol_type = genomic DNA
gttgaataaatgctggtgaatga

SEQ ID NO: 4141 - DNA, 23 bp, Homo sapiens
  source 1..23: mol_type = genomic DNA
ttgaataaatgctggtgaatgaa

SEQ ID NO: 4142 - DNA, 23 bp, Homo sapiens
  source 1..23: mol_type = genomic DNA
tgaataaatgctggtgaatgaat

SEQ ID NO: 4143 - DNA, 23 bp, Homo sapiens
  source 1..23: mol_type = genomic DNA
gaataaatgctggtgaatgaatg

SEQ ID NO: 4144 - DNA, 23 bp, Homo sapiens
  source 1..23: mol_type = genomic DNA
aataaatgctggtgaatgaatga

SEQ ID NO: 4145 - DNA, 23 bp, Homo sapiens
  source 1..23: mol_type = genomic DNA
ataaatgctggtgaatgaatgaa

SEQ ID NO: 4146 - DNA, 23 bp, Homo sapiens
  source 1..23: mol_type = genomic DNA
taaatgctggtgaatgaatgaat

SEQ ID NO: 4147 - DNA, 23 bp, Homo sapiens
  source 1..23: mol_type = genomic DNA
aaatgctggtgaatgaatgaatg

SEQ ID NO: 4148 - DNA, 23 bp, Homo sapiens
  source 1..23: mol_type = genomic DNA
aatgctggtgaatgaatgaatga

SEQ ID NO: 4149 - DNA, 23 bp, Homo sapiens
  source 1..23: mol_type = genomic DNA
atgctggtgaatgaatgaatgat

SEQ ID NO: 4150 - DNA, 23 bp, Homo sapiens
  source 1..23: mol_type = genomic DNA
tgctggtgaatgaatgaatgatt

SEQ ID NO: 4151 - DNA, 23 bp, Homo sapiens
  source 1..23: mol_type = genomic DNA
gctggtgaatgaatgaatgattg

SEQ ID NO: 4152 - DNA, 23 bp, Homo sapiens
  source 1..23: mol_type = genomic DNA
ctggtgaatgaatgaatgattga

SEQ ID NO: 4153 - DNA, 23 bp, Homo sapiens
  source 1..23: mol_type = genomic DNA
tggtgaatgaatgaatgattgaa

SEQ ID NO: 4154 - DNA, 23 bp, Homo sapiens
  source 1..23: mol_type = genomic DNA
ggtgaatgaatgaatgattgaac

SEQ ID NO: 4155 - DNA, 23 bp, Homo sapiens
  source 1..23: mol_type = genomic DNA
gtgaatgaatgaatgattgaaca

SEQ ID NO: 4156 - DNA, 23 bp, Homo sapiens
  source 1..23: mol_type = genomic DNA
tgaatgaatgaatgattgaacag

SEQ ID NO: 4157 - DNA, 23 bp, Homo sapiens
  source 1..23: mol_type = genomic DNA
gaatgaatgaatgattgaacaga

SEQ ID NO: 4158 - DNA, 23 bp, Homo sapiens
  source 1..23: mol_type = genomic DNA
aatgaatgaatgattgaacagat

SEQ ID NO: 4159 - DNA, 23 bp, Homo sapiens
  source 1..23: mol_type = genomic DNA
atgaatgaatgattgaacagatg

SEQ ID NO: 4160 - DNA, 23 bp, Homo sapiens
  source 1..23: mol_type = genomic DNA
tgaatgaatgattgaacagatga

SEQ ID NO: 4161 - DNA, 23 bp, Homo sapiens
  source 1..23: mol_type = genomic DNA
gaatgaatgattgaacagatgaa

SEQ ID NO: 4162 - DNA, 23 bp, Homo sapiens
  source 1..23: mol_type = genomic DNA
aatgaatgattgaacagatgaat

SEQ ID NO: 4163 - DNA, 23 bp, Homo sapiens
  source 1..23: mol_type = genomic DNA
atgaatgattgaacagatgaatg

SEQ ID NO: 4164 - DNA, 23 bp, Homo sapiens
  source 1..23: mol_type = genomic DNA
tgaatgattgaacagatgaatga

SEQ ID NO: 4165 - DNA, 23 bp, Homo sapiens
  source 1..23: mol_type = genomic DNA
gaatgattgaacagatgaatgag

SEQ ID NO: 4166 - DNA, 23 bp, Homo sapiens
  source 1..23: mol_type = genomic DNA
aatgattgaacagatgaatgagt

SEQ ID NO: 4167 - DNA, 23 bp, Homo sapiens
  source 1..23: mol_type = genomic DNA
atgattgaacagatgaatgagtg

SEQ ID NO: 4168 - DNA, 23 bp, Homo sapiens
  source 1..23: mol_type = genomic DNA
tgattgaacagatgaatgagtga

SEQ ID NO: 4169 - DNA, 23 bp, Homo sapiens
  source 1..23: mol_type = genomic DNA
gattgaacagatgaatgagtgat

SEQ ID NO: 4170 - DNA, 23 bp, Homo sapiens
  source 1..23: mol_type = genomic DNA
attgaacagatgaatgagtgatg

SEQ ID NO: 4171 - DNA, 23 bp, Homo sapiens
  source 1..23: mol_type = genomic DNA
ttgaacagatgaatgagtgatga

SEQ ID NO: 4172 - DNA, 23 bp, Homo sapiens
  source 1..23: mol_type = genomic DNA
tgaacagatgaatgagtgatgag

SEQ ID NO: 4173 - DNA, 23 bp, Homo sapiens
  source 1..23: mol_type = genomic DNA
gaacagatgaatgagtgatgagt

SEQ ID NO: 4174 - DNA, 23 bp, Homo sapiens
  source 1..23: mol_type = genomic DNA
aacagatgaatgagtgatgagta

SEQ ID NO: 4175 - DNA, 23 bp, Homo sapiens
  source 1..23: mol_type = genomic DNA
acagatgaatgagtgatgagtag

SEQ ID NO: 4176 - DNA, 23 bp, Homo sapiens
  source 1..23: mol_type = genomic DNA
cagatgaatgagtgatgagtaga

SEQ ID NO: 4177 - DNA, 23 bp, Homo sapiens
  source 1..23: mol_type = genomic DNA
agatgaatgagtgatgagtagat

SEQ ID NO: 4178 - DNA, 23 bp, Homo sapiens
  source 1..23: mol_type = genomic DNA
gatgaatgagtgatgagtagata

SEQ ID NO: 4179 - DNA, 23 bp, Homo sapiens
  source 1..23: mol_type = genomic DNA
atgaatgagtgatgagtagataa

SEQ ID NO: 4180 - DNA, 23 bp, Homo sapiens
  source 1..23: mol_type = genomic DNA
tgaatgagtgatgagtagataaa

SEQ ID NO: 4181 - DNA, 23 bp, Homo sapiens
  source 1..23: mol_type = genomic DNA
gaatgagtgatgagtagataaaa

SEQ ID NO: 4182 - DNA, 23 bp, Homo sapiens
  source 1..23: mol_type = genomic DNA
aatgagtgatgagtagataaaag

SEQ ID NO: 4183 - DNA, 23 bp, Homo sapiens
  source 1..23: mol_type = genomic DNA
atgagtgatgagtagataaaagg

SEQ ID NO: 4184 - DNA, 23 bp, Homo sapiens
  source 1..23: mol_type = genomic DNA
tgagtgatgagtagataaaagga

SEQ ID NO: 4185 - DNA, 23 bp, Homo sapiens
  source 1..23: mol_type = genomic DNA
gagtgatgagtagataaaaggat

SEQ ID NO: 4186 - DNA, 23 bp, Homo sapiens
  source 1..23: mol_type = genomic DNA
agtgatgagtagataaaaggatg

SEQ ID NO: 4187 - DNA, 23 bp, Homo sapiens
  source 1..23: mol_type = genomic DNA
gtgatgagtagataaaaggatgg

SEQ ID NO: 4188 - DNA, 23 bp, Homo sapiens
  source 1..23: mol_type = genomic DNA
tgatgagtagataaaaggatgga

SEQ ID NO: 4189 - DNA, 23 bp, Homo sapiens
  source 1..23: mol_type = genomic DNA
gatgagtagataaaaggatggat

SEQ ID NO: 4190 - DNA, 23 bp, Homo sapiens
  source 1..23: mol_type = genomic DNA
atgagtagataaaaggatggatg

SEQ ID NO: 4191 - DNA, 23 bp, Homo sapiens
  source 1..23: mol_type = genomic DNA
tgagtagataaaaggatggatgg

SEQ ID NO: 4192 - DNA, 23 bp, Homo sapiens
  source 1..23: mol_type = genomic DNA
gagtagataaaaggatggatgga

SEQ ID NO: 4193 - DNA, 23 bp, Homo sapiens
  source 1..23: mol_type = genomic DNA
agtagataaaaggatggatggag

SEQ ID NO: 4194 - DNA, 23 bp, Homo sapiens
  source 1..23: mol_type = genomic DNA
gtagataaaaggatggatggaga

SEQ ID NO: 4195 - DNA, 23 bp, Homo sapiens
  source 1..23: mol_type = genomic DNA
tagataaaaggatggatggagag

SEQ ID NO: 4196 - DNA, 23 bp, Homo sapiens
  source 1..23: mol_type = genomic DNA
agataaaaggatggatggagaga

SEQ ID NO: 4197 - DNA, 23 bp, Homo sapiens
  source 1..23: mol_type = genomic DNA
gataaaaggatggatggagagat

SEQ ID NO: 4198 - DNA, 23 bp, Homo sapiens
  source 1..23: mol_type = genomic DNA
ataaaaggatggatggagagatg

SEQ ID NO: 4199 - DNA, 23 bp, Homo sapiens
  source 1..23: mol_type = genomic DNA
taaaaggatggatggagagatgg

SEQ ID NO: 4200 - DNA, 23 bp, Homo sapiens
  source 1..23: mol_type = genomic DNA
aaaaggatggatggagagatggg

SEQ ID NO: 4201 - DNA, 23 bp, Homo sapiens
  source 1..23: mol_type = genomic DNA
aaaggatggatggagagatgggt

SEQ ID NO: 4202 - DNA, 23 bp, Homo sapiens
  source 1..23: mol_type = genomic DNA
aaggatggatggagagatgggtg

SEQ ID NO: 4203 - DNA, 23 bp, Homo sapiens
  source 1..23: mol_type = genomic DNA
aggatggatggagagatgggtga

SEQ ID NO: 4204 - DNA, 23 bp, Homo sapiens
  source 1..23: mol_type = genomic DNA
ggatggatggagagatgggtgag

SEQ ID NO: 4205 - DNA, 23 bp, Homo sapiens
  source 1..23: mol_type = genomic DNA
gatggatggagagatgggtgagt

SEQ ID NO: 4206 - DNA, 23 bp, Homo sapiens
  source 1..23: mol_type = genomic DNA
atggatggagagatgggtgagta

SEQ ID NO: 4207 - DNA, 23 bp, Homo sapiens
  source 1..23: mol_type = genomic DNA
tggatggagagatgggtgagtac

SEQ ID NO: 4208 - DNA, 23 bp, Homo sapiens
  source 1..23: mol_type = genomic DNA
ggatggagagatgggtgagtaca

SEQ ID NO: 4209 - DNA, 23 bp, Homo sapiens
  source 1..23: mol_type = genomic DNA
gatggagagatgggtgagtacat

SEQ ID NO: 4210 - DNA, 23 bp, Homo sapiens
  source 1..23: mol_type = genomic DNA
atggagagatgggtgagtacatg

SEQ ID NO: 4211 - DNA, 23 bp, Homo sapiens
  source 1..23: mol_type = genomic DNA
tggagagatgggtgagtacatgg

SEQ ID NO: 4212 - DNA, 23 bp, Homo sapiens
  source 1..23: mol_type = genomic DNA
ggagagatgggtgagtacatgga

SEQ ID NO: 4213 - DNA, 23 bp, Homo sapiens
  source 1..23: mol_type = genomic DNA
gagagatgggtgagtacatggat

SEQ ID NO: 4214 - DNA, 23 bp, Homo sapiens
  source 1..23: mol_type = genomic DNA
agagatgggtgagtacatggatg

SEQ ID NO: 4215 - DNA, 23 bp, Homo sapiens
  source 1..23: mol_type = genomic DNA
gagatgggtgagtacatggatgg

SEQ ID NO: 4216 - DNA, 23 bp, Homo sapiens
  source 1..23: mol_type = genomic DNA
agatgggtgagtacatggatgga

SEQ ID NO: 4217 - DNA, 23 bp, Homo sapiens
  source 1..23: mol_type = genomic DNA
gatgggtgagtacatggatggat

SEQ ID NO: 4218 - DNA, 23 bp, Homo sapiens
  source 1..23: mol_type = genomic DNA
atgggtgagtacatggatggata

SEQ ID NO: 4219 - DNA, 23 bp, Homo sapiens
  source 1..23: mol_type = genomic DNA
tgggtgagtacatggatggatag

SEQ ID NO: 4220 - DNA, 23 bp, Homo sapiens
  source 1..23: mol_type = genomic DNA
gggtgagtacatggatggataga

SEQ ID NO: 4221 - DNA, 23 bp, Homo sapiens
  source 1..23: mol_type = genomic DNA
ggtgagtacatggatggatagat

SEQ ID NO: 4222 - DNA, 23 bp, Homo sapiens
  source 1..23: mol_type = genomic DNA
gtgagtacatggatggatagatg

SEQ ID NO: 4223 - DNA, 23 bp, Homo sapiens
  source 1..23: mol_type = genomic DNA
tgagtacatggatggatagatgg

SEQ ID NO: 4224 - DNA, 23 bp, Homo sapiens
  source 1..23: mol_type = genomic DNA
gagtacatggatggatagatgga

SEQ ID NO: 4225 - DNA, 23 bp, Homo sapiens
  source 1..23: mol_type = genomic DNA
agtacatggatggatagatggat

SEQ ID NO: 4226 - DNA, 23 bp, Homo sapiens
  source 1..23: mol_type = genomic DNA
gtacatggatggatagatggatg

SEQ ID NO: 4227 - DNA, 23 bp, Homo sapiens
  source 1..23: mol_type = genomic DNA
tacatggatggatagatggatga

SEQ ID NO: 4228 - DNA, 23 bp, Homo sapiens
  source 1..23: mol_type = genomic DNA
acatggatggatagatggatgag

SEQ ID NO: 4229 - DNA, 23 bp, Homo sapiens
  source 1..23: mol_type = genomic DNA
catggatggatagatggatgagt

SEQ ID NO: 4230 - DNA, 23 bp, Homo sapiens
  source 1..23: mol_type = genomic DNA
atggatggatagatggatgagtt

SEQ ID NO: 4231 - DNA, 23 bp, Homo sapiens
  source 1..23: mol_type = genomic DNA
tggatggatagatggatgagttg

SEQ ID NO: 4232 - DNA, 23 bp, Homo sapiens
  source 1..23: mol_type = genomic DNA
ggatggatagatggatgagttgg

SEQ ID NO: 4233 - DNA, 23 bp, Homo sapiens
  source 1..23: mol_type = genomic DNA
gatggatagatggatgagttggt

SEQ ID NO: 4234 - DNA, 23 bp, Homo sapiens
  source 1..23: mol_type = genomic DNA
atggatagatggatgagttggtg

SEQ ID NO: 4235 - DNA, 23 bp, Homo sapiens
  source 1..23: mol_type = genomic DNA
tggatagatggatgagttggtgg

SEQ ID NO: 4236 - DNA, 23 bp, Homo sapiens
  source 1..23: mol_type = genomic DNA
ggatagatggatgagttggtggg

SEQ ID NO: 4237 - DNA, 23 bp, Homo sapiens
  source 1..23: mol_type = genomic DNA
gatagatggatgagttggtgggt

SEQ ID NO: 4238 - DNA, 23 bp, Homo sapiens
  source 1..23: mol_type = genomic DNA
atagatggatgagttggtgggta

SEQ ID NO: 4239 - DNA, 23 bp, Homo sapiens
  source 1..23: mol_type = genomic DNA
tagatggatgagttggtgggtag

SEQ ID NO: 4240 - DNA, 23 bp, Homo sapiens
  source 1..23: mol_type = genomic DNA
agatggatgagttggtgggtaga

SEQ ID NO: 4241 - DNA, 23 bp, Homo sapiens
  source 1..23: mol_type = genomic DNA
gatggatgagttggtgggtagat

SEQ ID NO: 4242 - DNA, 23 bp, Homo sapiens
  source 1..23: mol_type = genomic DNA
atggatgagttggtgggtagatt

SEQ ID NO: 4243 - DNA, 23 bp, Homo sapiens
  source 1..23: mol_type = genomic DNA
tggatgagttggtgggtagattc

SEQ ID NO: 4244 - DNA, 23 bp, Homo sapiens
  source 1..23: mol_type = genomic DNA
ggatgagttggtgggtagattcg

SEQ ID NO: 4245 - DNA, 23 bp, Homo sapiens
  source 1..23: mol_type = genomic DNA
gatgagttggtgggtagattcgt

SEQ ID NO: 4246 - DNA, 23 bp, Homo sapiens
  source 1..23: mol_type = genomic DNA
atgagttggtgggtagattcgtg

SEQ ID NO: 4247 - DNA, 23 bp, Homo sapiens
  source 1..23: mol_type = genomic DNA
tgagttggtgggtagattcgtgg

SEQ ID NO: 4248 - DNA, 23 bp, Homo sapiens
  source 1..23: mol_type = genomic DNA
gagttggtgggtagattcgtggc

SEQ ID NO: 4249 - DNA, 23 bp, Homo sapiens
  source 1..23: mol_type = genomic DNA
agttggtgggtagattcgtggct

SEQ ID NO: 4250 - DNA, 23 bp, Homo sapiens
  source 1..23: mol_type = genomic DNA
gttggtgggtagattcgtggcta

SEQ ID NO: 4251 - DNA, 23 bp, Homo sapiens
  source 1..23: mol_type = genomic DNA
ttggtgggtagattcgtggctag

SEQ ID NO: 4252 - DNA, 23 bp, Homo sapiens
  source 1..23: mol_type = genomic DNA
tggtgggtagattcgtggctaga

SEQ ID NO: 4253 - DNA, 23 bp, Homo sapiens
  source 1..23: mol_type = genomic DNA
ggtgggtagattcgtggctagat

SEQ ID NO: 4254 - DNA, 23 bp, Homo sapiens
  source 1..23: mol_type = genomic DNA
gtgggtagattcgtggctagatg

SEQ ID NO: 4255 - DNA, 23 bp, Homo sapiens
  source 1..23: mol_type = genomic DNA
tgggtagattcgtggctagatgg

SEQ ID NO: 4256 - DNA, 23 bp, Homo sapiens
  source 1..23: mol_type = genomic DNA
gggtagattcgtggctagatgga

SEQ ID NO: 4257 - DNA, 23 bp, Homo sapiens
  source 1..23: mol_type = genomic DNA
ggtagattcgtggctagatggat

SEQ ID NO: 4258 - DNA, 23 bp, Homo sapiens
  source 1..23: mol_type = genomic DNA
gtagattcgtggctagatggatg

SEQ ID NO: 4259 - DNA, 23 bp, Homo sapiens
  source 1..23: mol_type = genomic DNA
tagattcgtggctagatggatga

SEQ ID NO: 4260 - DNA, 23 bp, Homo sapiens
  source 1..23: mol_type = genomic DNA
agattcgtggctagatggatgat

SEQ ID NO: 4261 - DNA, 23 bp, Homo sapiens
  source 1..23: mol_type = genomic DNA
gattcgtggctagatggatgatg

SEQ ID NO: 4262 - DNA, 23 bp, Homo sapiens
  source 1..23: mol_type = genomic DNA
attcgtggctagatggatgatgg

SEQ ID NO: 4263 - DNA, 23 bp, Homo sapiens
  source 1..23: mol_type = genomic DNA
ttcgtggctagatggatgatgga

SEQ ID NO: 4264 - DNA, 23 bp, Homo sapiens
  source 1..23: mol_type = genomic DNA
tcgtggctagatggatgatggat

SEQ ID NO: 4265 - DNA, 23 bp, Homo sapiens
  source 1..23: mol_type = genomic DNA
cgtggctagatggatgatggatg

SEQ ID NO: 4266 - DNA, 23 bp, Homo sapiens
  source 1..23: mol_type = genomic DNA
gtggctagatggatgatggatgg

SEQ ID NO: 4267 - DNA, 23 bp, Homo sapiens
  source 1..23: mol_type = genomic DNA
tggctagatggatgatggatgga

SEQ ID NO: 4268 - DNA, 23 bp, Homo sapiens
  source 1..23: mol_type = genomic DNA
ggctagatggatgatggatggat

SEQ ID NO: 4269 - DNA, 23 bp, Homo sapiens
  source 1..23: mol_type = genomic DNA
gctagatggatgatggatggatg

SEQ ID NO: 4270 - DNA, 23 bp, Homo sapiens
  source 1..23: mol_type = genomic DNA
ctagatggatgatggatggatgg

SEQ ID NO: 4271 - DNA, 23 bp, Homo sapiens
  source 1..23: mol_type = genomic DNA
tagatggatgatggatggatgga

SEQ ID NO: 4272 - DNA, 23 bp, Homo sapiens
  source 1..23: mol_type = genomic DNA
agatggatgatggatggatggac

SEQ ID NO: 4273 - DNA, 23 bp, Homo sapiens
  source 1..23: mol_type = genomic DNA
gatggatgatggatggatggaca

SEQ ID NO: 4274 - DNA, 23 bp, Homo sapiens
  source 1..23: mol_type = genomic DNA
atggatgatggatggatggacag

SEQ ID NO: 4275 - DNA, 23 bp, Homo sapiens
  source 1..23: mol_type = genomic DNA
tggatgatggatggatggacaga

SEQ ID NO: 4276 - DNA, 23 bp, Homo sapiens
  source 1..23: mol_type = genomic DNA
ggatgatggatggatggacagat

SEQ ID NO: 4277 - DNA, 23 bp, Homo sapiens
  source 1..23: mol_type = genomic DNA
gatgatggatggatggacagatg

SEQ ID NO: 4278 - DNA, 23 bp, Homo sapiens
  source 1..23: mol_type = genomic DNA
atgatggatggatggacagatgg

SEQ ID NO: 4279 - DNA, 23 bp, Homo sapiens
  source 1..23: mol_type = genomic DNA
tgatggatggatggacagatgga

SEQ ID NO: 4280 - DNA, 23 bp, Homo sapiens
  source 1..23: mol_type = genomic DNA
gatggatggatggacagatggat

SEQ ID NO: 4281 - DNA, 23 bp, Homo sapiens
  source 1..23: mol_type = genomic DNA
atggatggatggacagatggatg

SEQ ID NO: 4282 - DNA, 23 bp, Homo sapiens
  source 1..23: mol_type = genomic DNA
tggatggatggacagatggatgg

SEQ ID NO: 4283 - DNA, 23 bp, Homo sapiens
  source 1..23: mol_type = genomic DNA
ggatggatggacagatggatgga

SEQ ID NO: 4284 - DNA, 23 bp, Homo sapiens
  source 1..23: mol_type = genomic DNA
gatggatggacagatggatggat

SEQ ID NO: 4285 - DNA, 23 bp, Homo sapiens
  source 1..23: mol_type = genomic DNA
atggatggacagatggatggata

SEQ ID NO: 4286 - DNA, 23 bp, Homo sapiens
  source 1..23: mol_type = genomic DNA
tggatggacagatggatggatat

SEQ ID NO: 4287 - DNA, 23 bp, Homo sapiens
  source 1..23: mol_type = genomic DNA
ggatggacagatggatggatata

SEQ ID NO: 4288 - DNA, 23 bp, Homo sapiens
  source 1..23: mol_type = genomic DNA
gatggacagatggatggatatat

SEQ ID NO: 4289 - DNA, 23 bp, Homo sapiens
  source 1..23: mol_type = genomic DNA
atggacagatggatggatatatg

SEQ ID NO: 4290 - DNA, 23 bp, Homo sapiens
  source 1..23: mol_type = genomic DNA
tggacagatggatggatatatga

SEQ ID NO: 4291 - DNA, 23 bp, Homo sapiens
  source 1..23: mol_type = genomic DNA
ggacagatggatggatatatgat

SEQ ID NO: 4292 - DNA, 23 bp, Homo sapiens
  source 1..23: mol_type = genomic DNA
gacagatggatggatatatgatt

SEQ ID NO: 4293 - DNA, 23 bp, Homo sapiens
  source 1..23: mol_type = genomic DNA
acagatggatggatatatgattg

SEQ ID NO: 4294 - DNA, 23 bp, Homo sapiens
  source 1..23: mol_type = genomic DNA
cagatggatggatatatgattga

SEQ ID NO: 4295 - DNA, 23 bp, Homo sapiens
  source 1..23: mol_type = genomic DNA
agatggatggatatatgattgaa

SEQ ID NO: 4296 - DNA, 23 bp, Homo sapiens
  source 1..23: mol_type = genomic DNA
gatggatggatatatgattgaac

SEQ ID NO: 4297 - DNA, 23 bp, Homo sapiens
  source 1..23: mol_type = genomic DNA
atggatggatatatgattgaact

SEQ ID NO: 4298 - DNA, 23 bp, Homo sapiens
  source 1..23: mol_type = genomic DNA
tggatggatatatgattgaacta

SEQ ID NO: 4299 - DNA, 23 bp, Homo sapiens
  source 1..23: mol_type = genomic DNA
ggatggatatatgattgaactat

SEQ ID NO: 4300 - DNA, 23 bp, Homo sapiens
  source 1..23: mol_type = genomic DNA
gatggatatatgattgaactatt

SEQ ID NO: 4301 - DNA, 23 bp, Homo sapiens
  source 1..23: mol_type = genomic DNA
atggatatatgattgaactattg

SEQ ID NO: 4302 - DNA, 23 bp, Homo sapiens
  source 1..23: mol_type = genomic DNA
tggatatatgattgaactattga

SEQ ID NO: 4303 - DNA, 23 bp, Homo sapiens
  source 1..23: mol_type = genomic DNA
ggatatatgattgaactattgaa

SEQ ID NO: 4304 - DNA, 23 bp, Homo sapiens
  source 1..23: mol_type = genomic DNA
gatatatgattgaactattgaaa

SEQ ID NO: 4305 - DNA, 23 bp, Homo sapiens
  source 1..23: mol_type = genomic DNA
atatatgattgaactattgaaag

SEQ ID NO: 4306 - DNA, 23 bp, Homo sapiens
  source 1..23: mol_type = genomic DNA
tatatgattgaactattgaaagt

SEQ ID NO: 4307 - DNA, 23 bp, Homo sapiens
  source 1..23: mol_type = genomic DNA
atatgattgaactattgaaagta

SEQ ID NO: 4308 - DNA, 23 bp, Homo sapiens
  source 1..23: mol_type = genomic DNA
tatgattgaactattgaaagtat

SEQ ID NO: 4309 - DNA, 23 bp, Homo sapiens
  source 1..23: mol_type = genomic DNA
atgattgaactattgaaagtata

SEQ ID NO: 4310 - DNA, 23 bp, Homo sapiens
  source 1..23: mol_type = genomic DNA
tgattgaactattgaaagtatag

SEQ ID NO: 4311 - DNA, 23 bp, Homo sapiens
  source 1..23: mol_type = genomic DNA
gattgaactattgaaagtataga

SEQ ID NO: 4312 - DNA, 23 bp, Homo sapiens
  source 1..23: mol_type = genomic DNA
attgaactattgaaagtatagat

SEQ ID NO: 4313 - DNA, 23 bp, Homo sapiens
  source 1..23: mol_type = genomic DNA
ttgaactattgaaagtatagatg

SEQ ID NO: 4314 - DNA, 23 bp, Homo sapiens
  source 1..23: mol_type = genomic DNA
tgaactattgaaagtatagatgt

SEQ ID NO: 4315 - DNA, 23 bp, Homo sapiens
  source 1..23: mol_type = genomic DNA
gaactattgaaagtatagatgta

SEQ ID NO: 4316 - DNA, 23 bp, Homo sapiens
  source 1..23: mol_type = genomic DNA
aactattgaaagtatagatgtat

SEQ ID NO: 4317 - DNA, 23 bp, Homo sapiens
  source 1..23: mol_type = genomic DNA
actattgaaagtatagatgtatg

SEQ ID NO: 4318 - DNA, 23 bp, Homo sapiens
  source 1..23: mol_type = genomic DNA
ctattgaaagtatagatgtatgg

SEQ ID NO: 4319 - DNA, 23 bp, Homo sapiens
  source 1..23: mol_type = genomic DNA
tattgaaagtatagatgtatgga

SEQ ID NO: 4320 - DNA, 23 bp, Homo sapiens
  source 1..23: mol_type = genomic DNA
attgaaagtatagatgtatggat

SEQ ID NO: 4321 - DNA, 23 bp, Homo sapiens
  source 1..23: mol_type = genomic DNA
ttgaaagtatagatgtatggatg

SEQ ID NO: 4322 - DNA, 23 bp, Homo sapiens
  source 1..23: mol_type = genomic DNA
tgaaagtatagatgtatggatgg

SEQ ID NO: 4323 - DNA, 23 bp, Homo sapiens
  source 1..23: mol_type = genomic DNA
gaaagtatagatgtatggatggg

SEQ ID NO: 4324 - DNA, 23 bp, Homo sapiens
  source 1..23: mol_type = genomic DNA
aaagtatagatgtatggatgggt

SEQ ID NO: 4325 - DNA, 23 bp, Homo sapiens
  source 1..23: mol_type = genomic DNA
aagtatagatgtatggatgggtg

SEQ ID NO: 4326 - DNA, 23 bp, Homo sapiens
  source 1..23: mol_type = genomic DNA
agtatagatgtatggatgggtga

SEQ ID NO: 4327 - DNA, 23 bp, Homo sapiens
  source 1..23: mol_type = genomic DNA
gtatagatgtatggatgggtgaa

SEQ ID NO: 4328 - DNA, 23 bp, Homo sapiens
  source 1..23: mol_type = genomic DNA
tatagatgtatggatgggtgaat

SEQ ID NO: 4329 - DNA, 23 bp, Homo sapiens
  source 1..23: mol_type = genomic DNA
atagatgtatggatgggtgaatt

SEQ ID NO: 4330 - DNA, 23 bp, Homo sapiens
  source 1..23: mol_type = genomic DNA
tagatgtatggatgggtgaattt

SEQ ID NO: 4331 - DNA, 23 bp, Homo sapiens
  source 1..23: mol_type = genomic DNA
agatgtatggatgggtgaatttg

SEQ ID NO: 4332 - DNA, 23 bp, Homo sapiens
  source 1..23: mol_type = genomic DNA
gatgtatggatgggtgaatttgg

SEQ ID NO: 4333 - DNA, 23 bp, Homo sapiens
  source 1..23: mol_type = genomic DNA
atgtatggatgggtgaatttggg

SEQ ID NO: 4334 - DNA, 23 bp, Homo sapiens
  source 1..23: mol_type = genomic DNA
tgtatggatgggtgaatttgggg

SEQ ID NO: 4335 - DNA, 23 bp, Homo sapiens
  source 1..23: mol_type = genomic DNA
gtatggatgggtgaatttggggg

SEQ ID NO: 4336 - DNA, 23 bp, Homo sapiens
  source 1..23: mol_type = genomic DNA
tatggatgggtgaatttgggggt

SEQ ID NO: 4337 - DNA, 23 bp, Homo sapiens
  source 1..23: mol_type = genomic DNA
atggatgggtgaatttgggggta

SEQ ID NO: 4338 - DNA, 23 bp, Homo sapiens
  source 1..23: mol_type = genomic DNA
tggatgggtgaatttgggggtaa

SEQ ID NO: 4339 - DNA, 23 bp, Homo sapiens
  source 1..23: mol_type = genomic DNA
ggatgggtgaatttgggggtaat

SEQ ID NO: 4340 - DNA, 23 bp, Homo sapiens
  source 1..23: mol_type = genomic DNA
gatgggtgaatttgggggtaatt

SEQ ID NO: 4341 - DNA, 23 bp, Homo sapiens
  source 1..23: mol_type = genomic DNA
atgggtgaatttgggggtaattg

SEQ ID NO: 4342 - DNA, 23 bp, Homo sapiens
  source 1..23: mol_type = genomic DNA
tgggtgaatttgggggtaattgt

SEQ ID NO: 4343 - DNA, 23 bp, Homo sapiens
  source 1..23: mol_type = genomic DNA
gggtgaatttgggggtaattgtt

SEQ ID NO: 4344 - DNA, 23 bp, Homo sapiens
  source 1..23: mol_type = genomic DNA
ggtgaatttgggggtaattgtta

SEQ ID NO: 4345 - DNA, 23 bp, Homo sapiens
  source 1..23: mol_type = genomic DNA
gtgaatttgggggtaattgttag

SEQ ID NO: 4346 - DNA, 23 bp, Homo sapiens
  source 1..23: mol_type = genomic DNA
tgaatttgggggtaattgttaga

SEQ ID NO: 4347 - DNA, 23 bp, Homo sapiens
  source 1..23: mol_type = genomic DNA
gaatttgggggtaattgttagat

SEQ ID NO: 4348 - DNA, 23 bp, Homo sapiens
  source 1..23: mol_type = genomic DNA
aatttgggggtaattgttagatg

SEQ ID NO: 4349 - DNA, 23 bp, Homo sapiens
  source 1..23: mol_type = genomic DNA
atttgggggtaattgttagatga

SEQ ID NO: 4350 - DNA, 23 bp, Homo sapiens
  source 1..23: mol_type = genomic DNA
tttgggggtaattgttagatgat

SEQ ID NO: 4351 - DNA, 23 bp, Homo sapiens
  source 1..23: mol_type = genomic DNA
ttgggggtaattgttagatgatg

SEQ ID NO: 4352 - DNA, 23 bp, Homo sapiens
  source 1..23: mol_type = genomic DNA
tgggggtaattgttagatgatgg

SEQ ID NO: 4353 - DNA, 23 bp, Homo sapiens
  source 1..23: mol_type = genomic DNA
gggggtaattgttagatgatgga

SEQ ID NO: 4354 - DNA, 23 bp, Homo sapiens
  source 1..23: mol_type = genomic DNA
ggggtaattgttagatgatggat

SEQ ID NO: 4355 - DNA, 23 bp, Homo sapiens
  source 1..23: mol_type = genomic DNA
gggtaattgttagatgatggatg

SEQ ID NO: 4356 - DNA, 23 bp, Homo sapiens
  source 1..23: mol_type = genomic DNA
ggtaattgttagatgatggatga

SEQ ID NO: 4357 - DNA, 23 bp, Homo sapiens
  source 1..23: mol_type = genomic DNA
gtaattgttagatgatggatgag

SEQ ID NO: 4358 - DNA, 23 bp, Homo sapiens
  source 1..23: mol_type = genomic DNA
taattgttagatgatggatgagt

SEQ ID NO: 4359 - DNA, 23 bp, Homo sapiens
  source 1..23: mol_type = genomic DNA
aattgttagatgatggatgagta

SEQ ID NO: 4360 - DNA, 23 bp, Homo sapiens
  source 1..23: mol_type = genomic DNA
attgttagatgatggatgagtat

SEQ ID NO: 4361 - DNA, 23 bp, Homo sapiens
  source 1..23: mol_type = genomic DNA
ttgttagatgatggatgagtata

SEQ ID NO: 4362 - DNA, 23 bp, Homo sapiens
  source 1..23: mol_type = genomic DNA
tgttagatgatggatgagtatag

SEQ ID NO: 4363 - DNA, 23 bp, Homo sapiens
  source 1..23: mol_type = genomic DNA
gttagatgatggatgagtataga

SEQ ID NO: 4364 - DNA, 23 bp, Homo sapiens
  source 1..23: mol_type = genomic DNA
ttagatgatggatgagtatagat

SEQ ID NO: 4365 - DNA, 23 bp, Homo sapiens
  source 1..23: mol_type = genomic DNA
tagatgatggatgagtatagatg

SEQ ID NO: 4366 - DNA, 23 bp, Homo sapiens
  source 1..23: mol_type = genomic DNA
agatgatggatgagtatagatga

SEQ ID NO: 4367 - DNA, 23 bp, Homo sapiens
  source 1..23: mol_type = genomic DNA
gatgatggatgagtatagatgaa

SEQ ID NO: 4368 - DNA, 23 bp, Homo sapiens
  source 1..23: mol_type = genomic DNA
atgatggatgagtatagatgaat

SEQ ID NO: 4369 - DNA, 23 bp, Homo sapiens
  source 1..23: mol_type = genomic DNA
tgatggatgagtatagatgaatg

SEQ ID NO: 4370 - DNA, 23 bp, Homo sapiens
  source 1..23: mol_type = genomic DNA
gatggatgagtatagatgaatga

SEQ ID NO: 4371 - DNA, 23 bp, Homo sapiens
  source 1..23: mol_type = genomic DNA
atggatgagtatagatgaatgat

SEQ ID NO: 4372 - DNA, 23 bp, Homo sapiens
  source 1..23: mol_type = genomic DNA
tggatgagtatagatgaatgatg

SEQ ID NO: 4373 - DNA, 23 bp, Homo sapiens
  source 1..23: mol_type = genomic DNA
ggatgagtatagatgaatgatgg

SEQ ID NO: 4374 - DNA, 23 bp, Homo sapiens
  source 1..23: mol_type = genomic DNA
gatgagtatagatgaatgatgga

SEQ ID NO: 4375 - DNA, 23 bp, Homo sapiens
  source 1..23: mol_type = genomic DNA
atgagtatagatgaatgatggat

SEQ ID NO: 4376 - DNA, 23 bp, Homo sapiens
  source 1..23: mol_type = genomic DNA
tgagtatagatgaatgatggatg

SEQ ID NO: 4377 - DNA, 23 bp, Homo sapiens
  source 1..23: mol_type = genomic DNA
gagtatagatgaatgatggatgg

SEQ ID NO: 4378 - DNA, 23 bp, Homo sapiens
  source 1..23: mol_type = genomic DNA
agtatagatgaatgatggatgga

SEQ ID NO: 4379 - DNA, 23 bp, Homo sapiens
  source 1..23: mol_type = genomic DNA
gtatagatgaatgatggatggat

SEQ ID NO: 4380 - DNA, 23 bp, Homo sapiens
  source 1..23: mol_type = genomic DNA
tatagatgaatgatggatggata

SEQ ID NO: 4381 - DNA, 23 bp, Homo sapiens
  source 1..23: mol_type = genomic DNA
atagatgaatgatggatggataa

SEQ ID NO: 4382 - DNA, 23 bp, Homo sapiens
  source 1..23: mol_type = genomic DNA
tagatgaatgatggatggataac

SEQ ID NO: 4383 - DNA, 23 bp, Homo sapiens
  source 1..23: mol_type = genomic DNA
agatgaatgatggatggataact

SEQ ID NO: 4384 - DNA, 23 bp, Homo sapiens
  source 1..23: mol_type = genomic DNA
gatgaatgatggatggataactt

SEQ ID NO: 4385 - DNA, 23 bp, Homo sapiens
  source 1..23: mol_type = genomic DNA
atgaatgatggatggataacttg

SEQ ID NO: 4386 - DNA, 23 bp, Homo sapiens
  source 1..23: mol_type = genomic DNA
tgaatgatggatggataacttga

SEQ ID NO: 4387 - DNA, 23 bp, Homo sapiens
  source 1..23: mol_type = genomic DNA
gaatgatggatggataacttgat

SEQ ID NO: 4388 - DNA, 23 bp, Homo sapiens
  source 1..23: mol_type = genomic DNA
aatgatggatggataacttgatg

SEQ ID NO: 4389 - DNA, 23 bp, Homo sapiens
  source 1..23: mol_type = genomic DNA
atgatggatggataacttgatga

SEQ ID NO: 4390 - DNA, 23 bp, Homo sapiens
  source 1..23: mol_type = genomic DNA
tgatggatggataacttgatgag

SEQ ID NO: 4391 - DNA, 23 bp, Homo sapiens
  source 1..23: mol_type = genomic DNA
gatggatggataacttgatgagt

SEQ ID NO: 4392 - DNA, 23 bp, Homo sapiens
  source 1..23: mol_type = genomic DNA
atggatggataacttgatgagtg

SEQ ID NO: 4393 - DNA, 23 bp, Homo sapiens
  source 1..23: mol_type = genomic DNA
tggatggataacttgatgagtgg

SEQ ID NO: 4394 - DNA, 23 bp, Homo sapiens
  source 1..23: mol_type = genomic DNA
ggatggataacttgatgagtgga

SEQ ID NO: 4395 - DNA, 23 bp, Homo sapiens
  source 1..23: mol_type = genomic DNA
gatggataacttgatgagtggat

SEQ ID NO: 4396 - DNA, 23 bp, Homo sapiens
  source 1..23: mol_type = genomic DNA
atggataacttgatgagtggata

SEQ ID NO: 4397 - DNA, 23 bp, Homo sapiens
  source 1..23: mol_type = genomic DNA
tggataacttgatgagtggatag

SEQ ID NO: 4398 - DNA, 23 bp, Homo sapiens
  source 1..23: mol_type = genomic DNA
ggataacttgatgagtggataga

SEQ ID NO: 4399 - DNA, 23 bp, Homo sapiens
  source 1..23: mol_type = genomic DNA
gataacttgatgagtggatagat

SEQ ID NO: 4400 - DNA, 23 bp, Homo sapiens
  source 1..23: mol_type = genomic DNA
ataacttgatgagtggatagata

SEQ ID NO: 4401 - DNA, 23 bp, Homo sapiens
  source 1..23: mol_type = genomic DNA
taacttgatgagtggatagatag

SEQ ID NO: 4402 - DNA, 23 bp, Homo sapiens
  source 1..23: mol_type = genomic DNA
aacttgatgagtggatagataga

SEQ ID NO: 4403 - DNA, 23 bp, Homo sapiens
  source 1..23: mol_type = genomic DNA
acttgatgagtggatagatagat

SEQ ID NO: 4404 - DNA, 23 bp, Homo sapiens
  source 1..23: mol_type = genomic DNA
cttgatgagtggatagatagatt

SEQ ID NO: 4405 - DNA, 23 bp, Homo sapiens
  source 1..23: mol_type = genomic DNA
ttgatgagtggatagatagattg

SEQ ID NO: 4406 - DNA, 23 bp, Homo sapiens
  source 1..23: mol_type = genomic DNA
tgatgagtggatagatagattgc

SEQ ID NO: 4407 - DNA, 23 bp, Homo sapiens
  source 1..23: mol_type = genomic DNA
gatgagtggatagatagattgct

SEQ ID NO: 4408 - DNA, 23 bp, Homo sapiens
  source 1..23: mol_type = genomic DNA
atgagtggatagatagattgctg

SEQ ID NO: 4409 - DNA, 23 bp, Homo sapiens
  source 1..23: mol_type = genomic DNA
tgagtggatagatagattgctgg

SEQ ID NO: 4410 - DNA, 23 bp, Homo sapiens
  source 1..23: mol_type = genomic DNA
gagtggatagatagattgctgga

SEQ ID NO: 4411 - DNA, 23 bp, Homo sapiens
  source 1..23: mol_type = genomic DNA
agtggatagatagattgctggat

SEQ ID NO: 4412 - DNA, 23 bp, Homo sapiens
  source 1..23: mol_type = genomic DNA
gtggatagatagattgctggata

SEQ ID NO: 4413 - DNA, 23 bp, Homo sapiens
  source 1..23: mol_type = genomic DNA
tggatagatagattgctggatag

SEQ ID NO: 4414 - DNA, 23 bp, Homo sapiens
  source 1..23: mol_type = genomic DNA
ggatagatagattgctggataga

SEQ ID NO: 4415 - DNA, 23 bp, Homo sapiens
  source 1..23: mol_type = genomic DNA
gatagatagattgctggatagat

SEQ ID NO: 4416 - DNA, 23 bp, Homo sapiens
  source 1..23: mol_type = genomic DNA
atagatagattgctggatagatg

SEQ ID NO: 4417 - DNA, 23 bp, Homo sapiens
  source 1..23: mol_type = genomic DNA
tagatagattgctggatagatga

SEQ ID NO: 4418 - DNA, 23 bp, Homo sapiens
  source 1..23: mol_type = genomic DNA
agatagattgctggatagatgat

SEQ ID NO: 4419 - DNA, 23 bp, Homo sapiens
  source 1..23: mol_type = genomic DNA
gatagattgctggatagatgatt

SEQ ID NO: 4420 - DNA, 23 bp, Homo sapiens
  source 1..23: mol_type = genomic DNA
atagattgctggatagatgattg

SEQ ID NO: 4421 - DNA, 23 bp, Homo sapiens
  source 1..23: mol_type = genomic DNA
tagattgctggatagatgattga

SEQ ID NO: 4422 - DNA, 23 bp, Homo sapiens
  source 1..23: mol_type = genomic DNA
agattgctggatagatgattgac

SEQ ID NO: 4423 - DNA, 23 bp, Homo sapiens
  source 1..23: mol_type = genomic DNA
gattgctggatagatgattgact

SEQ ID NO: 4424 - DNA, 23 bp, Homo sapiens
  source 1..23: mol_type = genomic DNA
attgctggatagatgattgactg

SEQ ID NO: 4425 - DNA, 23 bp, Homo sapiens
  source 1..23: mol_type = genomic DNA
ttgctggatagatgattgactgg

SEQ ID NO: 4426 - DNA, 23 bp, Homo sapiens
  source 1..23: mol_type = genomic DNA
tgctggatagatgattgactggg

SEQ ID NO: 4427 - DNA, 23 bp, Homo sapiens
  source 1..23: mol_type = genomic DNA
gctggatagatgattgactgggt

SEQ ID NO: 4428 - DNA, 23 bp, Homo sapiens
  source 1..23: mol_type = genomic DNA
ctggatagatgattgactgggtg

SEQ ID NO: 4429 - DNA, 23 bp, Homo sapiens
  source 1..23: mol_type = genomic DNA
tggatagatgattgactgggtgg

SEQ ID NO: 4430 - DNA, 23 bp, Homo sapiens
  source 1..23: mol_type = genomic DNA
ggatagatgattgactgggtgga

SEQ ID NO: 4431 - DNA, 23 bp, Homo sapiens
  source 1..23: mol_type = genomic DNA
gatagatgattgactgggtggat

SEQ ID NO: 4432 - DNA, 23 bp, Homo sapiens
  source 1..23: mol_type = genomic DNA
atagatgattgactgggtggata

SEQ ID NO: 4433 - DNA, 23 bp, Homo sapiens
  source 1..23: mol_type = genomic DNA
tagatgattgactgggtggatag

SEQ ID NO: 4434 - DNA, 23 bp, Homo sapiens
  source 1..23: mol_type = genomic DNA
agatgattgactgggtggataga

SEQ ID NO: 4435 - DNA, 23 bp, Homo sapiens
  source 1..23: mol_type = genomic DNA
gatgattgactgggtggatagat

SEQ ID NO: 4436 - DNA, 23 bp, Homo sapiens
  source 1..23: mol_type = genomic DNA
atgattgactgggtggatagatg

SEQ ID NO: 4437 - DNA, 23 bp, Homo sapiens
  source 1..23: mol_type = genomic DNA
tgattgactgggtggatagatga

SEQ ID NO: 4438 - DNA, 23 bp, Homo sapiens
  source 1..23: mol_type = genomic DNA
gattgactgggtggatagatgaa

SEQ ID NO: 4439 - DNA, 23 bp, Homo sapiens
  source 1..23: mol_type = genomic DNA
attgactgggtggatagatgaaa

SEQ ID NO: 4440 - DNA, 23 bp, Homo sapiens
  source 1..23: mol_type = genomic DNA
ttgactgggtggatagatgaaat

SEQ ID NO: 4441 - DNA, 23 bp, Homo sapiens
  source 1..23: mol_type = genomic DNA
tgactgggtggatagatgaaatg

SEQ ID NO: 4442 - DNA, 23 bp, Homo sapiens
  source 1..23: mol_type = genomic DNA
gactgggtggatagatgaaatgt

SEQ ID NO: 4443 - DNA, 23 bp, Homo sapiens
  source 1..23: mol_type = genomic DNA
actgggtggatagatgaaatgtt

SEQ ID NO: 4444 - DNA, 23 bp, Homo sapiens
  source 1..23: mol_type = genomic DNA
ctgggtggatagatgaaatgttg

SEQ ID NO: 4445 - DNA, 23 bp, Homo sapiens
  source 1..23: mol_type = genomic DNA
tgggtggatagatgaaatgttgg

SEQ ID NO: 4446 - DNA, 23 bp, Homo sapiens
  source 1..23: mol_type = genomic DNA
gggtggatagatgaaatgttgga

SEQ ID NO: 4447 - DNA, 23 bp, Homo sapiens
  source 1..23: mol_type = genomic DNA
ggtggatagatgaaatgttggat

SEQ ID NO: 4448 - DNA, 23 bp, Homo sapiens
  source 1..23: mol_type = genomic DNA
gtggatagatgaaatgttggatg

SEQ ID NO: 4449 - DNA, 23 bp, Homo sapiens
  source 1..23: mol_type = genomic DNA
tggatagatgaaatgttggatga

SEQ ID NO: 4450 - DNA, 23 bp, Homo sapiens
  source 1..23: mol_type = genomic DNA
ggatagatgaaatgttggatgag

SEQ ID NO: 4451 - DNA, 23 bp, Homo sapiens
  source 1..23: mol_type = genomic DNA
gatagatgaaatgttggatgagc

SEQ ID NO: 4452 - DNA, 23 bp, Homo sapiens
  source 1..23: mol_type = genomic DNA
atagatgaaatgttggatgagca

SEQ ID NO: 4453 - DNA, 23 bp, Homo sapiens
  source 1..23: mol_type = genomic DNA
tagatgaaatgttggatgagcag

SEQ ID NO: 4454 - DNA, 23 bp, Homo sapiens
  source 1..23: mol_type = genomic DNA
agatgaaatgttggatgagcaga

SEQ ID NO: 4455 - DNA, 23 bp, Homo sapiens
  source 1..23: mol_type = genomic DNA
gatgaaatgttggatgagcagat

SEQ ID NO: 4456 - DNA, 23 bp, Homo sapiens
  source 1..23: mol_type = genomic DNA
atgaaatgttggatgagcagatt

SEQ ID NO: 4457 - DNA, 23 bp, Homo sapiens
  source 1..23: mol_type = genomic DNA
tgaaatgttggatgagcagatta

SEQ ID NO: 4458 - DNA, 23 bp, Homo sapiens
  source 1..23: mol_type = genomic DNA
gaaatgttggatgagcagattaa

SEQ ID NO: 4459 - DNA, 23 bp, Homo sapiens
  source 1..23: mol_type = genomic DNA
aaatgttggatgagcagattaag

SEQ ID NO: 4460 - DNA, 23 bp, Homo sapiens
  source 1..23: mol_type = genomic DNA
aatgttggatgagcagattaagt

SEQ ID NO: 4461 - DNA, 23 bp, Homo sapiens
  source 1..23: mol_type = genomic DNA
atgttggatgagcagattaagtt

SEQ ID NO: 4462 - DNA, 23 bp, Homo sapiens
  source 1..23: mol_type = genomic DNA
tgttggatgagcagattaagttg

SEQ ID NO: 4463 - DNA, 23 bp, Homo sapiens
  source 1..23: mol_type = genomic DNA
gttggatgagcagattaagttgt

SEQ ID NO: 4464 - DNA, 23 bp, Homo sapiens
  source 1..23: mol_type = genomic DNA
ttggatgagcagattaagttgta

SEQ ID NO: 4465 - DNA, 23 bp, Homo sapiens
  source 1..23: mol_type = genomic DNA
tggatgagcagattaagttgtat

SEQ ID NO: 4466 - DNA, 23 bp, Homo sapiens
  source 1..23: mol_type = genomic DNA
ggatgagcagattaagttgtatt

SEQ ID NO: 4467 - DNA, 23 bp, Homo sapiens
  source 1..23: mol_type = genomic DNA
gatgagcagattaagttgtattg

SEQ ID NO: 4468 - DNA, 23 bp, Homo sapiens
  source 1..23: mol_type = genomic DNA
atgagcagattaagttgtattgg

SEQ ID NO: 4469 - DNA, 23 bp, Homo sapiens
  source 1..23: mol_type = genomic DNA
tgagcagattaagttgtattgga

SEQ ID NO: 4470 - DNA, 23 bp, Homo sapiens
  source 1..23: mol_type = genomic DNA
gagcagattaagttgtattggat

SEQ ID NO: 4471 - DNA, 23 bp, Homo sapiens
  source 1..23: mol_type = genomic DNA
agcagattaagttgtattggatg

SEQ ID NO: 4472 - DNA, 23 bp, Homo sapiens
  source 1..23: mol_type = genomic DNA
gcagattaagttgtattggatgg

SEQ ID NO: 4473 - DNA, 23 bp, Homo sapiens
  source 1..23: mol_type = genomic DNA
cagattaagttgtattggatggg

SEQ ID NO: 4474 - DNA, 23 bp, Homo sapiens
  source 1..23: mol_type = genomic DNA
agattaagttgtattggatggga

SEQ ID NO: 4475 - DNA, 23 bp, Homo sapiens
  source 1..23: mol_type = genomic DNA
gattaagttgtattggatgggat

SEQ ID NO: 4476 - DNA, 23 bp, Homo sapiens
  source 1..23: mol_type = genomic DNA
attaagttgtattggatgggatg

SEQ ID NO: 4477 - DNA, 23 bp, Homo sapiens
  source 1..23: mol_type = genomic DNA
ttaagttgtattggatgggatgg

SEQ ID NO: 4478 - DNA, 23 bp, Homo sapiens
  source 1..23: mol_type = genomic DNA
taagttgtattggatgggatgga

SEQ ID NO: 4479 - DNA, 23 bp, Homo sapiens
  source 1..23: mol_type = genomic DNA
aagttgtattggatgggatggat

SEQ ID NO: 4480 - DNA, 23 bp, Homo sapiens
  source 1..23: mol_type = genomic DNA
agttgtattggatgggatggatg

SEQ ID NO: 4481 - DNA, 23 bp, Homo sapiens
  source 1..23: mol_type = genomic DNA
gttgtattggatgggatggatgg

SEQ ID NO: 4482 - DNA, 23 bp, Homo sapiens
  source 1..23: mol_type = genomic DNA
ttgtattggatgggatggatgga

SEQ ID NO: 4483 - DNA, 23 bp, Homo sapiens
  source 1..23: mol_type = genomic DNA
tgtattggatgggatggatggaa

SEQ ID NO: 4484 - DNA, 23 bp, Homo sapiens
  source 1..23: mol_type = genomic DNA
gtattggatgggatggatggaag

SEQ ID NO: 4485 - DNA, 23 bp, Homo sapiens
  source 1..23: mol_type = genomic DNA
tattggatgggatggatggaagt

SEQ ID NO: 4486 - DNA, 23 bp, Homo sapiens
  source 1..23: mol_type = genomic DNA
attggatgggatggatggaagtg

SEQ ID NO: 4487 - DNA, 23 bp, Homo sapiens
  source 1..23: mol_type = genomic DNA
ttggatgggatggatggaagtgt

SEQ ID NO: 4488 - DNA, 23 bp, Homo sapiens
  source 1..23: mol_type = genomic DNA
tggatgggatggatggaagtgtg

SEQ ID NO: 4489 - DNA, 23 bp, Homo sapiens
  source 1..23: mol_type = genomic DNA
ggatgggatggatggaagtgtgg

SEQ ID NO: 4490 - DNA, 23 bp, Homo sapiens
  source 1..23: mol_type = genomic DNA
gatgggatggatggaagtgtggt

SEQ ID NO: 4491 - DNA, 23 bp, Homo sapiens
  source 1..23: mol_type = genomic DNA
atgggatggatggaagtgtggtt

SEQ ID NO: 4492 - DNA, 23 bp, Homo sapiens
  source 1..23: mol_type = genomic DNA
tgggatggatggaagtgtggttg

SEQ ID NO: 4493 - DNA, 23 bp, Homo sapiens
  source 1..23: mol_type = genomic DNA
gggatggatggaagtgtggttga

SEQ ID NO: 4494 - DNA, 23 bp, Homo sapiens
  source 1..23: mol_type = genomic DNA
ggatggatggaagtgtggttgag

SEQ ID NO: 4495 - DNA, 23 bp, Homo sapiens
  source 1..23: mol_type = genomic DNA
gatggatggaagtgtggttgagt

SEQ ID NO: 4496 - DNA, 23 bp, Homo sapiens
  source 1..23: mol_type = genomic DNA
atggatggaagtgtggttgagtt

SEQ ID NO: 4497 - DNA, 23 bp, Homo sapiens
  source 1..23: mol_type = genomic DNA
tggatggaagtgtggttgagtta

SEQ ID NO: 4498 - DNA, 23 bp, Homo sapiens
  source 1..23: mol_type = genomic DNA
ggatggaagtgtggttgagttat

SEQ ID NO: 4499 - DNA, 23 bp, Homo sapiens
  source 1..23: mol_type = genomic DNA
gatggaagtgtggttgagttatt

SEQ ID NO: 4500 - DNA, 23 bp, Homo sapiens
  source 1..23: mol_type = genomic DNA
atggaagtgtggttgagttatta

SEQ ID NO: 4501 - DNA, 23 bp, Homo sapiens
  source 1..23: mol_type = genomic DNA
tggaagtgtggttgagttattag

SEQ ID NO: 4502 - DNA, 23 bp, Homo sapiens
  source 1..23: mol_type = genomic DNA
ggaagtgtggttgagttattaga

SEQ ID NO: 4503 - DNA, 23 bp, Homo sapiens
  source 1..23: mol_type = genomic DNA
gaagtgtggttgagttattagaa

SEQ ID NO: 4504 - DNA, 23 bp, Homo sapiens
  source 1..23: mol_type = genomic DNA
aagtgtggttgagttattagaag

SEQ ID NO: 4505 - DNA, 23 bp, Homo sapiens
  source 1..23: mol_type = genomic DNA
agtgtggttgagttattagaagg

SEQ ID NO: 4506 - DNA, 23 bp, Homo sapiens
  source 1..23: mol_type = genomic DNA
gtgtggttgagttattagaagga

SEQ ID NO: 4507 - DNA, 23 bp, Homo sapiens
  source 1..23: mol_type = genomic DNA
tgtggttgagttattagaaggaa

SEQ ID NO: 4508 - DNA, 23 bp, Homo sapiens
  source 1..23: mol_type = genomic DNA
gtggttgagttattagaaggaag

SEQ ID NO: 4509 - DNA, 23 bp, Homo sapiens
  source 1..23: mol_type = genomic DNA
tggttgagttattagaaggaaga

SEQ ID NO: 4510 - DNA, 23 bp, Homo sapiens
  source 1..23: mol_type = genomic DNA
ggttgagttattagaaggaagat

SEQ ID NO: 4511 - DNA, 23 bp, Homo sapiens
  source 1..23: mol_type = genomic DNA
gttgagttattagaaggaagatt

SEQ ID NO: 4512 - DNA, 23 bp, Homo sapiens
  source 1..23: mol_type = genomic DNA
ttgagttattagaaggaagattg

SEQ ID NO: 4513 - DNA, 23 bp, Homo sapiens
  source 1..23: mol_type = genomic DNA
tgagttattagaaggaagattga

SEQ ID NO: 4514 - DNA, 23 bp, Homo sapiens
  source 1..23: mol_type = genomic DNA
gagttattagaaggaagattgag

SEQ ID NO: 4515 - DNA, 23 bp, Homo sapiens
  source 1..23: mol_type = genomic DNA
agttattagaaggaagattgagt

SEQ ID NO: 4516 - DNA, 23 bp, Homo sapiens
  source 1..23: mol_type = genomic DNA
gttattagaaggaagattgagta

SEQ ID NO: 4517 - DNA, 23 bp, Homo sapiens
  source 1..23: mol_type = genomic DNA
ttattagaaggaagattgagtag

SEQ ID NO: 4518 - DNA, 23 bp, Homo sapiens
  source 1..23: mol_type = genomic DNA
tattagaaggaagattgagtaga

SEQ ID NO: 4519 - DNA, 23 bp, Homo sapiens
  source 1..23: mol_type = genomic DNA
attagaaggaagattgagtagat

SEQ ID NO: 4520 - DNA, 23 bp, Homo sapiens
  source 1..23: mol_type = genomic DNA
ttagaaggaagattgagtagata

SEQ ID NO: 4521 - DNA, 23 bp, Homo sapiens
  source 1..23: mol_type = genomic DNA
tagaaggaagattgagtagatag

SEQ ID NO: 4522 - DNA, 23 bp, Homo sapiens
  source 1..23: mol_type = genomic DNA
agaaggaagattgagtagatagg

SEQ ID NO: 4523 - DNA, 23 bp, Homo sapiens
  source 1..23: mol_type = genomic DNA
gaaggaagattgagtagataggt

SEQ ID NO: 4524 - DNA, 23 bp, Homo sapiens
  source 1..23: mol_type = genomic DNA
aaggaagattgagtagataggtg

SEQ ID NO: 4525 - DNA, 23 bp, Homo sapiens
  source 1..23: mol_type = genomic DNA
aggaagattgagtagataggtga

SEQ ID NO: 4526 - DNA, 23 bp, Homo sapiens
  source 1..23: mol_type = genomic DNA
ggaagattgagtagataggtgaa

SEQ ID NO: 4527 - DNA, 23 bp, Homo sapiens
  source 1..23: mol_type = genomic DNA
gaagattgagtagataggtgaat

SEQ ID NO: 4528 - DNA, 23 bp, Homo sapiens
  source 1..23: mol_type = genomic DNA
aagattgagtagataggtgaatt

SEQ ID NO: 4529 - DNA, 23 bp, Homo sapiens
  source 1..23: mol_type = genomic DNA
agattgagtagataggtgaattt

SEQ ID NO: 4530 - DNA, 23 bp, Homo sapiens
  source 1..23: mol_type = genomic DNA
gattgagtagataggtgaatttg

SEQ ID NO: 4531 - DNA, 23 bp, Homo sapiens
  source 1..23: mol_type = genomic DNA
attgagtagataggtgaatttgt

SEQ ID NO: 4532 - DNA, 23 bp, Homo sapiens
  source 1..23: mol_type = genomic DNA
ttgagtagataggtgaatttgtt

SEQ ID NO: 4533 - DNA, 23 bp, Homo sapiens
  source 1..23: mol_type = genomic DNA
tgagtagataggtgaatttgttg

SEQ ID NO: 4534 - DNA, 23 bp, Homo sapiens
  source 1..23: mol_type = genomic DNA
gagtagataggtgaatttgttga

SEQ ID NO: 4535 - DNA, 23 bp, Homo sapiens
  source 1..23: mol_type = genomic DNA
agtagataggtgaatttgttgat

SEQ ID NO: 4536 - DNA, 23 bp, Homo sapiens
  source 1..23: mol_type = genomic DNA
gtagataggtgaatttgttgata

SEQ ID NO: 4537 - DNA, 23 bp, Homo sapiens
  source 1..23: mol_type = genomic DNA
tagataggtgaatttgttgatag

SEQ ID NO: 4538 - DNA, 23 bp, Homo sapiens
  source 1..23: mol_type = genomic DNA
agataggtgaatttgttgatagt

SEQ ID NO: 4539 - DNA, 23 bp, Homo sapiens
  source 1..23: mol_type = genomic DNA
gataggtgaatttgttgatagtc

SEQ ID NO: 4540 - DNA, 23 bp, Homo sapiens
  source 1..23: mol_type = genomic DNA
ataggtgaatttgttgatagtca

SEQ ID NO: 4541 - DNA, 23 bp, Homo sapiens
  source 1..23: mol_type = genomic DNA
taggtgaatttgttgatagtcag

SEQ ID NO: 4542 - DNA, 23 bp, Homo sapiens
  source 1..23: mol_type = genomic DNA
aggtgaatttgttgatagtcaga

SEQ ID NO: 4543 - DNA, 23 bp, Homo sapiens
  source 1..23: mol_type = genomic DNA
ggtgaatttgttgatagtcagat

SEQ ID NO: 4544 - DNA, 23 bp, Homo sapiens
  source 1..23: mol_type = genomic DNA
gtgaatttgttgatagtcagatg

SEQ ID NO: 4545 - DNA, 23 bp, Homo sapiens
  source 1..23: mol_type = genomic DNA
tgaatttgttgatagtcagatgg

SEQ ID NO: 4546 - DNA, 23 bp, Homo sapiens
  source 1..23: mol_type = genomic DNA
gaatttgttgatagtcagatggg

SEQ ID NO: 4547 - DNA, 23 bp, Homo sapiens
  source 1..23: mol_type = genomic DNA
aatttgttgatagtcagatgggt

SEQ ID NO: 4548 - DNA, 23 bp, Homo sapiens
  source 1..23: mol_type = genomic DNA
atttgttgatagtcagatgggta

SEQ ID NO: 4549 - DNA, 23 bp, Homo sapiens
  source 1..23: mol_type = genomic DNA
tttgttgatagtcagatgggtag

SEQ ID NO: 4550 - DNA, 23 bp, Homo sapiens
  source 1..23: mol_type = genomic DNA
ttgttgatagtcagatgggtaga

SEQ ID NO: 4551 - DNA, 23 bp, Homo sapiens
  source 1..23: mol_type = genomic DNA
tgttgatagtcagatgggtagat

SEQ ID NO: 4552 - DNA, 23 bp, Homo sapiens
  source 1..23: mol_type = genomic DNA
gttgatagtcagatgggtagata

SEQ ID NO: 4553 - DNA, 23 bp, Homo sapiens
  source 1..23: mol_type = genomic DNA
ttgatagtcagatgggtagatag

SEQ ID NO: 4554 - DNA, 23 bp, Homo sapiens
  source 1..23: mol_type = genomic DNA
tgatagtcagatgggtagatagg

SEQ ID NO: 4555 - DNA, 23 bp, Homo sapiens
  source 1..23: mol_type = genomic DNA
gatagtcagatgggtagataggt

SEQ ID NO: 4556 - DNA, 23 bp, Homo sapiens
  source 1..23: mol_type = genomic DNA
atagtcagatgggtagataggta

SEQ ID NO: 4557 - DNA, 23 bp, Homo sapiens
  source 1..23: mol_type = genomic DNA
tagtcagatgggtagataggtag

SEQ ID NO: 4558 - DNA, 23 bp, Homo sapiens
  source 1..23: mol_type = genomic DNA
agtcagatgggtagataggtaga

SEQ ID NO: 4559 - DNA, 23 bp, Homo sapiens
  source 1..23: mol_type = genomic DNA
gtcagatgggtagataggtagat

SEQ ID NO: 4560 - DNA, 23 bp, Homo sapiens
  source 1..23: mol_type = genomic DNA
tcagatgggtagataggtagatg

SEQ ID NO: 4561 - DNA, 23 bp, Homo sapiens
  source 1..23: mol_type = genomic DNA
cagatgggtagataggtagatgg

SEQ ID NO: 4562 - DNA, 23 bp, Homo sapiens
  source 1..23: mol_type = genomic DNA
agatgggtagataggtagatgga

SEQ ID NO: 4563 - DNA, 23 bp, Homo sapiens
  source 1..23: mol_type = genomic DNA
gatgggtagataggtagatggat

SEQ ID NO: 4564 - DNA, 23 bp, Homo sapiens
  source 1..23: mol_type = genomic DNA
atgggtagataggtagatggatg

SEQ ID NO: 4565 - DNA, 23 bp, Homo sapiens
  source 1..23: mol_type = genomic DNA
tgggtagataggtagatggatgg

SEQ ID NO: 4566 - DNA, 23 bp, Homo sapiens
  source 1..23: mol_type = genomic DNA
gggtagataggtagatggatgga

SEQ ID NO: 4567 - DNA, 23 bp, Homo sapiens
  source 1..23: mol_type = genomic DNA
ggtagataggtagatggatggat

SEQ ID NO: 4568 - DNA, 23 bp, Homo sapiens
  source 1..23: mol_type = genomic DNA
gtagataggtagatggatggatg

SEQ ID NO: 4569 - DNA, 23 bp, Homo sapiens
  source 1..23: mol_type = genomic DNA
tagataggtagatggatggatgg

SEQ ID NO: 4570 - DNA, 23 bp, Homo sapiens
  source 1..23: mol_type = genomic DNA
agataggtagatggatggatgga

SEQ ID NO: 4571 - DNA, 23 bp, Homo sapiens
  source 1..23: mol_type = genomic DNA
gataggtagatggatggatggat

SEQ ID NO: 4572 - DNA, 23 bp, Homo sapiens
  source 1..23: mol_type = genomic DNA
ataggtagatggatggatggatg

SEQ ID NO: 4573 - DNA, 23 bp, Homo sapiens
  source 1..23: mol_type = genomic DNA
taggtagatggatggatggatgg

SEQ ID NO: 4574 - DNA, 23 bp, Homo sapiens
  source 1..23: mol_type = genomic DNA
aggtagatggatggatggatgga

SEQ ID NO: 4575 - DNA, 23 bp, Homo sapiens
  source 1..23: mol_type = genomic DNA
ggtagatggatggatggatggat

SEQ ID NO: 4576 - DNA, 23 bp, Homo sapiens
  source 1..23: mol_type = genomic DNA
gtagatggatggatggatggatg

SEQ ID NO: 4577 - DNA, 23 bp, Homo sapiens
  source 1..23: mol_type = genomic DNA
tagatggatggatggatggatgg

SEQ ID NO: 4578 - DNA, 23 bp, Homo sapiens
  source 1..23: mol_type = genomic DNA
agatggatggatggatggatgga

SEQ ID NO: 4579 - DNA, 23 bp, Homo sapiens
  source 1..23: mol_type = genomic DNA
gatggatggatggatggatggat

SEQ ID NO: 4580 - DNA, 23 bp, Homo sapiens
  source 1..23: mol_type = genomic DNA
atggatggatggatggatggatg

SEQ ID NO: 4581 - DNA, 23 bp, Homo sapiens
  source 1..23: mol_type = genomic DNA
tggatggatggatggatggatgt

SEQ ID NO: 4582 - DNA, 23 bp, Homo sapiens
  source 1..23: mol_type = genomic DNA
ggatggatggatggatggatgta

SEQ ID NO: 4583 - DNA, 23 bp, Homo sapiens
  source 1..23: mol_type = genomic DNA
gatggatggatggatggatgtat

SEQ ID NO: 4584 - DNA, 23 bp, Homo sapiens
  source 1..23: mol_type = genomic DNA
atggatggatggatggatgtata

SEQ ID NO: 4585 - DNA, 23 bp, Homo sapiens
  source 1..23: mol_type = genomic DNA
tggatggatggatggatgtatag

SEQ ID NO: 4586 - DNA, 23 bp, Homo sapiens
  source 1..23: mol_type = genomic DNA
ggatggatggatggatgtatagg

SEQ ID NO: 4587 - DNA, 23 bp, Homo sapiens
  source 1..23: mol_type = genomic DNA
gatggatggatggatgtataggc

SEQ ID NO: 4588 - DNA, 23 bp, Homo sapiens
  source 1..23: mol_type = genomic DNA
atggatggatggatgtataggca

SEQ ID NO: 4589 - DNA, 23 bp, Homo sapiens
  source 1..23: mol_type = genomic DNA
tggatggatggatgtataggcag

SEQ ID NO: 4590 - DNA, 23 bp, Homo sapiens
  source 1..23: mol_type = genomic DNA
ggatggatggatgtataggcaga

SEQ ID NO: 4591 - DNA, 23 bp, Homo sapiens
  source 1..23: mol_type = genomic DNA
gatggatggatgtataggcagat

SEQ ID NO: 4592 - DNA, 23 bp, Homo sapiens
  source 1..23: mol_type = genomic DNA
atggatggatgtataggcagatg

SEQ ID NO: 4593 - DNA, 23 bp, Homo sapiens
  source 1..23: mol_type = genomic DNA
tggatggatgtataggcagatgg

SEQ ID NO: 4594 - DNA, 23 bp, Homo sapiens
  source 1..23: mol_type = genomic DNA
ggatggatgtataggcagatgga

SEQ ID NO: 4595 - DNA, 23 bp, Homo sapiens
  source 1..23: mol_type = genomic DNA
gatggatgtataggcagatggac

SEQ ID NO: 4596 - DNA, 23 bp, Homo sapiens
  source 1..23: mol_type = genomic DNA
atggatgtataggcagatggaca

SEQ ID NO: 4597 - DNA, 23 bp, Homo sapiens
  source 1..23: mol_type = genomic DNA
tggatgtataggcagatggacaa

SEQ ID NO: 4598 - DNA, 23 bp, Homo sapiens
  source 1..23: mol_type = genomic DNA
ggatgtataggcagatggacaaa

SEQ ID NO: 4599 - DNA, 23 bp, Homo sapiens
  source 1..23: mol_type = genomic DNA
gatgtataggcagatggacaaat

SEQ ID NO: 4600 - DNA, 23 bp, Homo sapiens
  source 1..23: mol_type = genomic DNA
atgtataggcagatggacaaatg

SEQ ID NO: 4601 - DNA, 23 bp, Homo sapiens
  source 1..23: mol_type = genomic DNA
tgtataggcagatggacaaatgg

SEQ ID NO: 4602 - DNA, 23 bp, Homo sapiens
  source 1..23: mol_type = genomic DNA
gtataggcagatggacaaatgga

SEQ ID NO: 4603 - DNA, 23 bp, Homo sapiens
  source 1..23: mol_type = genomic DNA
tataggcagatggacaaatggat

SEQ ID NO: 4604 - DNA, 23 bp, Homo sapiens
  source 1..23: mol_type = genomic DNA
ataggcagatggacaaatggatg

SEQ ID NO: 4605 - DNA, 23 bp, Homo sapiens
  source 1..23: mol_type = genomic DNA
taggcagatggacaaatggatga

SEQ ID NO: 4606 - DNA, 23 bp, Homo sapiens
  source 1..23: mol_type = genomic DNA
aggcagatggacaaatggatgaa

SEQ ID NO: 4607 - DNA, 23 bp, Homo sapiens
  source 1..23: mol_type = genomic DNA
ggcagatggacaaatggatgaat

SEQ ID NO: 4608 - DNA, 23 bp, Homo sapiens
  source 1..23: mol_type = genomic DNA
gcagatggacaaatggatgaatg

SEQ ID NO: 4609 - DNA, 23 bp, Homo sapiens
  source 1..23: mol_type = genomic DNA
cagatggacaaatggatgaatgg

SEQ ID NO: 4610 - DNA, 23 bp, Homo sapiens
  source 1..23: mol_type = genomic DNA
agatggacaaatggatgaatggg

SEQ ID NO: 4611 - DNA, 23 bp, Homo sapiens
  source 1..23: mol_type = genomic DNA
gatggacaaatggatgaatgggt

SEQ ID NO: 4612 - DNA, 23 bp, Homo sapiens
  source 1..23: mol_type = genomic DNA
atggacaaatggatgaatgggtg

SEQ ID NO: 4613 - DNA, 23 bp, Homo sapiens
  source 1..23: mol_type = genomic DNA
tggacaaatggatgaatgggtgg

SEQ ID NO: 4614 - DNA, 23 bp, Homo sapiens
  source 1..23: mol_type = genomic DNA
ggacaaatggatgaatgggtggg

SEQ ID NO: 4615 - DNA, 23 bp, Homo sapiens
  source 1..23: mol_type = genomic DNA
gacaaatggatgaatgggtgggt

SEQ ID NO: 4616 - DNA, 23 bp, Homo sapiens
  source 1..23: mol_type = genomic DNA
acaaatggatgaatgggtgggtg

SEQ ID NO: 4617 - DNA, 23 bp, Homo sapiens
  source 1..23: mol_type = genomic DNA
caaatggatgaatgggtgggtgg

SEQ ID NO: 4618 - DNA, 23 bp, Homo sapiens
  source 1..23: mol_type = genomic DNA
aaatggatgaatgggtgggtgga

SEQ ID NO: 4619 - DNA, 23 bp, Homo sapiens
  source 1..23: mol_type = genomic DNA
aatggatgaatgggtgggtggat

SEQ ID NO: 4620 - DNA, 23 bp, Homo sapiens
  source 1..23: mol_type = genomic DNA
atggatgaatgggtgggtggatg

SEQ ID NO: 4621 - DNA, 23 bp, Homo sapiens
  source 1..23: mol_type = genomic DNA
tggatgaatgggtgggtggatga

SEQ ID NO: 4622 - DNA, 23 bp, Homo sapiens
  source 1..23: mol_type = genomic DNA
ggatgaatgggtgggtggatgaa

SEQ ID NO: 4623 - DNA, 23 bp, Homo sapiens
  source 1..23: mol_type = genomic DNA
gatgaatgggtgggtggatgaat

SEQ ID NO: 4624 - DNA, 23 bp, Homo sapiens
  source 1..23: mol_type = genomic DNA
atgaatgggtgggtggatgaatg

SEQ ID NO: 4625 - DNA, 23 bp, Homo sapiens
  source 1..23: mol_type = genomic DNA
tgaatgggtgggtggatgaatgg

SEQ ID NO: 4626 - DNA, 23 bp, Homo sapiens
  source 1..23: mol_type = genomic DNA
gaatgggtgggtggatgaatgga

SEQ ID NO: 4627 - DNA, 23 bp, Homo sapiens
  source 1..23: mol_type = genomic DNA
aatgggtgggtggatgaatggaa

SEQ ID NO: 4628 - DNA, 23 bp, Homo sapiens
  source 1..23: mol_type = genomic DNA
atgggtgggtggatgaatggaag

SEQ ID NO: 4629 - DNA, 23 bp, Homo sapiens
  source 1..23: mol_type = genomic DNA
tgggtgggtggatgaatggaagg

SEQ ID NO: 4630 - DNA, 23 bp, Homo sapiens
  source 1..23: mol_type = genomic DNA
gggtgggtggatgaatggaagga

SEQ ID NO: 4631 - DNA, 23 bp, Homo sapiens
  source 1..23: mol_type = genomic DNA
ggtgggtggatgaatggaaggat

SEQ ID NO: 4632 - DNA, 23 bp, Homo sapiens
  source 1..23: mol_type = genomic DNA
gtgggtggatgaatggaaggatg

SEQ ID NO: 4633 - DNA, 23 bp, Homo sapiens
  source 1..23: mol_type = genomic DNA
tgggtggatgaatggaaggatgt

SEQ ID NO: 4634 - DNA, 23 bp, Homo sapiens
  source 1..23: mol_type = genomic DNA
gggtggatgaatggaaggatgtg

SEQ ID NO: 4635 - DNA, 23 bp, Homo sapiens
  source 1..23: mol_type = genomic DNA
ggtggatgaatggaaggatgtgt

SEQ ID NO: 4636 - DNA, 23 bp, Homo sapiens
  source 1..23: mol_type = genomic DNA
gtggatgaatggaaggatgtgtg

SEQ ID NO: 4637 - DNA, 23 bp, Homo sapiens
  source 1..23: mol_type = genomic DNA
tggatgaatggaaggatgtgtgg

SEQ ID NO: 4638 - DNA, 23 bp, Homo sapiens
  source 1..23: mol_type = genomic DNA
ggatgaatggaaggatgtgtggt

SEQ ID NO: 4639 - DNA, 23 bp, Homo sapiens
  source 1..23: mol_type = genomic DNA
gatgaatggaaggatgtgtggtt

SEQ ID NO: 4640 - DNA, 23 bp, Homo sapiens
  source 1..23: mol_type = genomic DNA
atgaatggaaggatgtgtggttg

SEQ ID NO: 4641 - DNA, 23 bp, Homo sapiens
  source 1..23: mol_type = genomic DNA
tgaatggaaggatgtgtggttga

SEQ ID NO: 4642 - DNA, 23 bp, Homo sapiens
  source 1..23: mol_type = genomic DNA
gaatggaaggatgtgtggttgaa

SEQ ID NO: 4643 - DNA, 23 bp, Homo sapiens
  source 1..23: mol_type = genomic DNA
aatggaaggatgtgtggttgaac

SEQ ID NO: 4644 - DNA, 23 bp, Homo sapiens
  source 1..23: mol_type = genomic DNA
atggaaggatgtgtggttgaact

SEQ ID NO: 4645 - DNA, 23 bp, Homo sapiens
  source 1..23: mol_type = genomic DNA
tggaaggatgtgtggttgaacta

SEQ ID NO: 4646 - DNA, 23 bp, Homo sapiens
  source 1..23: mol_type = genomic DNA
ggaaggatgtgtggttgaactat

SEQ ID NO: 4647 - DNA, 23 bp, Homo sapiens
  source 1..23: mol_type = genomic DNA
gaaggatgtgtggttgaactatt

SEQ ID NO: 4648 - DNA, 23 bp, Homo sapiens
  source 1..23: mol_type = genomic DNA
aaggatgtgtggttgaactattg

SEQ ID NO: 4649 - DNA, 23 bp, Homo sapiens
  source 1..23: mol_type = genomic DNA
aggatgtgtggttgaactattgc

SEQ ID NO: 4650 - DNA, 23 bp, Homo sapiens
  source 1..23: mol_type = genomic DNA
ggatgtgtggttgaactattgca

SEQ ID NO: 4651 - DNA, 23 bp, Homo sapiens
  source 1..23: mol_type = genomic DNA
gatgtgtggttgaactattgcaa

SEQ ID NO: 4652 - DNA, 23 bp, Homo sapiens
  source 1..23: mol_type = genomic DNA
atgtgtggttgaactattgcaag

SEQ ID NO: 4653 - DNA, 23 bp, Homo sapiens
  source 1..23: mol_type = genomic DNA
tgtgtggttgaactattgcaagt

SEQ ID NO: 4654 - DNA, 23 bp, Homo sapiens
  source 1..23: mol_type = genomic DNA
gtgtggttgaactattgcaagta

SEQ ID NO: 4655 - DNA, 23 bp, Homo sapiens
  source 1..23: mol_type = genomic DNA
tgtggttgaactattgcaagtat

SEQ ID NO: 4656 - DNA, 23 bp, Homo sapiens
  source 1..23: mol_type = genomic DNA
gtggttgaactattgcaagtatt

SEQ ID NO: 4657 - DNA, 23 bp, Homo sapiens
  source 1..23: mol_type = genomic DNA
tggttgaactattgcaagtattg

SEQ ID NO: 4658 - DNA, 23 bp, Homo sapiens
  source 1..23: mol_type = genomic DNA
ggttgaactattgcaagtattga

SEQ ID NO: 4659 - DNA, 23 bp, Homo sapiens
  source 1..23: mol_type = genomic DNA
gttgaactattgcaagtattgat

SEQ ID NO: 4660 - DNA, 23 bp, Homo sapiens
  source 1..23: mol_type = genomic DNA
ttgaactattgcaagtattgata

SEQ ID NO: 4661 - DNA, 23 bp, Homo sapiens
  source 1..23: mol_type = genomic DNA
tgaactattgcaagtattgataa

SEQ ID NO: 4662 - DNA, 23 bp, Homo sapiens
  source 1..23: mol_type = genomic DNA
gaactattgcaagtattgataat

SEQ ID NO: 4663 - DNA, 23 bp, Homo sapiens
  source 1..23: mol_type = genomic DNA
aactattgcaagtattgataatt

SEQ ID NO: 4664 - DNA, 23 bp, Homo sapiens
  source 1..23: mol_type = genomic DNA
actattgcaagtattgataattg

SEQ ID NO: 4665 - DNA, 23 bp, Homo sapiens
  source 1..23: mol_type = genomic DNA
ctattgcaagtattgataattgg

SEQ ID NO: 4666 - DNA, 23 bp, Homo sapiens
  source 1..23: mol_type = genomic DNA
tattgcaagtattgataattggg

SEQ ID NO: 4667 - DNA, 23 bp, Homo sapiens
  source 1..23: mol_type = genomic DNA
attgcaagtattgataattgggt

SEQ ID NO: 4668 - DNA, 23 bp, Homo sapiens
  source 1..23: mol_type = genomic DNA
ttgcaagtattgataattgggtt

SEQ ID NO: 4669 - DNA, 23 bp, Homo sapiens
  source 1..23: mol_type = genomic DNA
tgcaagtattgataattgggttc

SEQ ID NO: 4670 - DNA, 23 bp, Homo sapiens
  source 1..23: mol_type = genomic DNA
gcaagtattgataattgggttca

SEQ ID NO: 4671 - DNA, 23 bp, Homo sapiens
  source 1..23: mol_type = genomic DNA
caagtattgataattgggttcat

SEQ ID NO: 4672 - DNA, 23 bp, Homo sapiens
  source 1..23: mol_type = genomic DNA
aagtattgataattgggttcata

SEQ ID NO: 4673 - DNA, 23 bp, Homo sapiens
  source 1..23: mol_type = genomic DNA
agtattgataattgggttcataa

SEQ ID NO: 4674 - DNA, 23 bp, Homo sapiens
  source 1..23: mol_type = genomic DNA
gtattgataattgggttcataat

SEQ ID NO: 4675 - DNA, 23 bp, Homo sapiens
  source 1..23: mol_type = genomic DNA
tattgataattgggttcataatt

SEQ ID NO: 4676 - DNA, 23 bp, Homo sapiens
  source 1..23: mol_type = genomic DNA
attgataattgggttcataattt

SEQ ID NO: 4677 - DNA, 23 bp, Homo sapiens
  source 1..23: mol_type = genomic DNA
ttgataattgggttcataatttc

SEQ ID NO: 4678 - DNA, 23 bp, Homo sapiens
  source 1..23: mol_type = genomic DNA
tgataattgggttcataatttct

SEQ ID NO: 4679 - DNA, 23 bp, Homo sapiens
  source 1..23: mol_type = genomic DNA
gataattgggttcataatttctg

SEQ ID NO: 4680 - DNA, 23 bp, Homo sapiens
  source 1..23: mol_type = genomic DNA
ataattgggttcataatttctga

SEQ ID NO: 4681 - DNA, 23 bp, Homo sapiens
  source 1..23: mol_type = genomic DNA
taattgggttcataatttctgaa

SEQ ID NO: 4682 - DNA, 23 bp, Homo sapiens
  source 1..23: mol_type = genomic DNA
aattgggttcataatttctgaat

SEQ ID NO: 4683 - DNA, 23 bp, Homo sapiens
  source 1..23: mol_type = genomic DNA
attgggttcataatttctgaata

SEQ ID NO: 4684 - DNA, 23 bp, Homo sapiens
  source 1..23: mol_type = genomic DNA
ttgggttcataatttctgaatat

SEQ ID NO: 4685 - DNA, 23 bp, Homo sapiens
  source 1..23: mol_type = genomic DNA
tgggttcataatttctgaatatt

SEQ ID NO: 4686 - DNA, 23 bp, Homo sapiens
  source 1..23: mol_type = genomic DNA
gggttcataatttctgaatattt

SEQ ID NO: 4687 - DNA, 23 bp, Homo sapiens
  source 1..23: mol_type = genomic DNA
ggttcataatttctgaatattta

SEQ ID NO: 4688 - DNA, 23 bp, Homo sapiens
  source 1..23: mol_type = genomic DNA
gttcataatttctgaatatttag

SEQ ID NO: 4689 - DNA, 23 bp, Homo sapiens
  source 1..23: mol_type = genomic DNA
ttcataatttctgaatatttaga

SEQ ID NO: 4690 - DNA, 23 bp, Homo sapiens
  source 1..23: mol_type = genomic DNA
tcataatttctgaatatttagat

SEQ ID NO: 4691 - DNA, 23 bp, Homo sapiens
  source 1..23: mol_type = genomic DNA
cataatttctgaatatttagatg

SEQ ID NO: 4692 - DNA, 23 bp, Homo sapiens
  source 1..23: mol_type = genomic DNA
ataatttctgaatatttagatgg

SEQ ID NO: 4693 - DNA, 23 bp, Homo sapiens
  source 1..23: mol_type = genomic DNA
taatttctgaatatttagatgga

SEQ ID NO: 4694 - DNA, 23 bp, Homo sapiens
  source 1..23: mol_type = genomic DNA
aatttctgaatatttagatggat

SEQ ID NO: 4695 - DNA, 23 bp, Homo sapiens
  source 1..23: mol_type = genomic DNA
atttctgaatatttagatggatg

SEQ ID NO: 4696 - DNA, 23 bp, Homo sapiens
  source 1..23: mol_type = genomic DNA
tttctgaatatttagatggatgg

SEQ ID NO: 4697 - DNA, 23 bp, Homo sapiens
  source 1..23: mol_type = genomic DNA
ttctgaatatttagatggatggt

SEQ ID NO: 4698 - DNA, 23 bp, Homo sapiens
  source 1..23: mol_type = genomic DNA
tctgaatatttagatggatggtt

SEQ ID NO: 4699 - DNA, 23 bp, Homo sapiens
  source 1..23: mol_type = genomic DNA
ctgaatatttagatggatggttg

SEQ ID NO: 4700 - DNA, 23 bp, Homo sapiens
  source 1..23: mol_type = genomic DNA
tgaatatttagatggatggttgt

SEQ ID NO: 4701 - DNA, 23 bp, Homo sapiens
  source 1..23: mol_type = genomic DNA
gaatatttagatggatggttgtg

SEQ ID NO: 4702 - DNA, 23 bp, Homo sapiens
  source 1..23: mol_type = genomic DNA
aatatttagatggatggttgtga

SEQ ID NO: 4703 - DNA, 23 bp, Homo sapiens
  source 1..23: mol_type = genomic DNA
atatttagatggatggttgtgag

SEQ ID NO: 4704 - DNA, 23 bp, Homo sapiens
  source 1..23: mol_type = genomic DNA
tatttagatggatggttgtgagt

SEQ ID NO: 4705 - DNA, 23 bp, Homo sapiens
  source 1..23: mol_type = genomic DNA
atttagatggatggttgtgagtg

SEQ ID NO: 4706 - DNA, 23 bp, Homo sapiens
  source 1..23: mol_type = genomic DNA
tttagatggatggttgtgagtgg

SEQ ID NO: 4707 - DNA, 23 bp, Homo sapiens
  source 1..23: mol_type = genomic DNA
ttagatggatggttgtgagtggc

SEQ ID NO: 4708 - DNA, 23 bp, Homo sapiens
  source 1..23: mol_type = genomic DNA
tagatggatggttgtgagtggct

SEQ ID NO: 4709 - DNA, 23 bp, Homo sapiens
  source 1..23: mol_type = genomic DNA
agatggatggttgtgagtggctg

SEQ ID NO: 4710 - DNA, 23 bp, Homo sapiens
  source 1..23: mol_type = genomic DNA
gatggatggttgtgagtggctgg

SEQ ID NO: 4711 - DNA, 23 bp, Homo sapiens
  source 1..23: mol_type = genomic DNA
atggatggttgtgagtggctggt

SEQ ID NO: 4712 - DNA, 23 bp, Homo sapiens
  source 1..23: mol_type = genomic DNA
tggatggttgtgagtggctggtg

SEQ ID NO: 4713 - DNA, 23 bp, Homo sapiens
  source 1..23: mol_type = genomic DNA
ggatggttgtgagtggctggtgg

SEQ ID NO: 4714 - DNA, 23 bp, Homo sapiens
  source 1..23: mol_type = genomic DNA
gatggttgtgagtggctggtgga

SEQ ID NO: 4715 - DNA, 23 bp, Homo sapiens
  source 1..23: mol_type = genomic DNA
atggttgtgagtggctggtggac

SEQ ID NO: 4716 - DNA, 23 bp, Homo sapiens
  source 1..23: mol_type = genomic DNA
tggttgtgagtggctggtggaca

SEQ ID NO: 4717 - DNA, 23 bp, Homo sapiens
  source 1..23: mol_type = genomic DNA
ggttgtgagtggctggtggacag

SEQ ID NO: 4718 - DNA, 23 bp, Homo sapiens
  source 1..23: mol_type = genomic DNA
gttgtgagtggctggtggacaga

SEQ ID NO: 4719 - DNA, 23 bp, Homo sapiens
  source 1..23: mol_type = genomic DNA
ttgtgagtggctggtggacagac

SEQ ID NO: 4720 - DNA, 23 bp, Homo sapiens
  source 1..23: mol_type = genomic DNA
tgtgagtggctggtggacagacg

SEQ ID NO: 4721 - DNA, 23 bp, Homo sapiens
  source 1..23: mol_type = genomic DNA
gtgagtggctggtggacagacga

SEQ ID NO: 4722 - DNA, 23 bp, Homo sapiens
  source 1..23: mol_type = genomic DNA
tgagtggctggtggacagacgaa

SEQ ID NO: 4723 - DNA, 23 bp, Homo sapiens
  source 1..23: mol_type = genomic DNA
gagtggctggtggacagacgaaa

SEQ ID NO: 4724 - DNA, 23 bp, Homo sapiens
  source 1..23: mol_type = genomic DNA
agtggctggtggacagacgaaaa

SEQ ID NO: 4725 - DNA, 23 bp, Homo sapiens
  source 1..23: mol_type = genomic DNA
gtggctggtggacagacgaaaaa

SEQ ID NO: 4726 - DNA, 23 bp, Homo sapiens
  source 1..23: mol_type = genomic DNA
tggctggtggacagacgaaaaat

SEQ ID NO: 4727 - DNA, 23 bp, Homo sapiens
  source 1..23: mol_type = genomic DNA
ggctggtggacagacgaaaaatg

SEQ ID NO: 4728 - DNA, 23 bp, Homo sapiens
  source 1..23: mol_type = genomic DNA
gctggtggacagacgaaaaatgg

SEQ ID NO: 4729 - DNA, 23 bp, Homo sapiens
  source 1..23: mol_type = genomic DNA
ctggtggacagacgaaaaatgga

SEQ ID NO: 4730 - DNA, 23 bp, Homo sapiens
  source 1..23: mol_type = genomic DNA
tggtggacagacgaaaaatggat

SEQ ID NO: 4731 - DNA, 23 bp, Homo sapiens
  source 1..23: mol_type = genomic DNA
ggtggacagacgaaaaatggatg

SEQ ID NO: 4732 - DNA, 23 bp, Homo sapiens
  source 1..23: mol_type = genomic DNA
gtggacagacgaaaaatggatgg

SEQ ID NO: 4733 - DNA, 23 bp, Homo sapiens
  source 1..23: mol_type = genomic DNA
tggacagacgaaaaatggatggt

SEQ ID NO: 4734 - DNA, 23 bp, Homo sapiens
  source 1..23: mol_type = genomic DNA
ggacagacgaaaaatggatggtt

SEQ ID NO: 4735 - DNA, 23 bp, Homo sapiens
  source 1..23: mol_type = genomic DNA
gacagacgaaaaatggatggttg

SEQ ID NO: 4736 - DNA, 23 bp, Homo sapiens
  source 1..23: mol_type = genomic DNA
acagacgaaaaatggatggttgg

SEQ ID NO: 4737 - DNA, 23 bp, Homo sapiens
  source 1..23: mol_type = genomic DNA
cagacgaaaaatggatggttgga

SEQ ID NO: 4738 - DNA, 23 bp, Homo sapiens
  source 1..23: mol_type = genomic DNA
agacgaaaaatggatggttggat

SEQ ID NO: 4739 - DNA, 23 bp, Homo sapiens
  source 1..23: mol_type = genomic DNA
gacgaaaaatggatggttggata

SEQ ID NO: 4740 - DNA, 23 bp, Homo sapiens
  source 1..23: mol_type = genomic DNA
acgaaaaatggatggttggataa

SEQ ID NO: 4741 - DNA, 23 bp, Homo sapiens
  source 1..23: mol_type = genomic DNA
cgaaaaatggatggttggataaa

SEQ ID NO: 4742 - DNA, 23 bp, Homo sapiens
  source 1..23: mol_type = genomic DNA
gaaaaatggatggttggataaat

SEQ ID NO: 4743 - DNA, 23 bp, Homo sapiens
  source 1..23: mol_type = genomic DNA
aaaaatggatggttggataaatt

SEQ ID NO: 4744 - DNA, 23 bp, Homo sapiens
  source 1..23: mol_type = genomic DNA
aaaatggatggttggataaattg

SEQ ID NO: 4745 - DNA, 23 bp, Homo sapiens
  source 1..23: mol_type = genomic DNA
aaatggatggttggataaattga

SEQ ID NO: 4746 - DNA, 23 bp, Homo sapiens
  source 1..23: mol_type = genomic DNA
aatggatggttggataaattgat

SEQ ID NO: 4747 - DNA, 23 bp, Homo sapiens
  source 1..23: mol_type = genomic DNA
atggatggttggataaattgatg

SEQ ID NO: 4748 - DNA, 23 bp, Homo sapiens
  source 1..23: mol_type = genomic DNA
tggatggttggataaattgatgg

SEQ ID NO: 4749 - DNA, 23 bp, Homo sapiens
  source 1..23: mol_type = genomic DNA
ggatggttggataaattgatggg

SEQ ID NO: 4750 - DNA, 23 bp, Homo sapiens
  source 1..23: mol_type = genomic DNA
gatggttggataaattgatgggt

SEQ ID NO: 4751 - DNA, 23 bp, Homo sapiens
  source 1..23: mol_type = genomic DNA
atggttggataaattgatgggtg

SEQ ID NO: 4752 - DNA, 23 bp, Homo sapiens
  source 1..23: mol_type = genomic DNA
tggttggataaattgatgggtgg

SEQ ID NO: 4753 - DNA, 23 bp, Homo sapiens
  source 1..23: mol_type = genomic DNA
ggttggataaattgatgggtgga

SEQ ID NO: 4754 - DNA, 23 bp, Homo sapiens
  source 1..23: mol_type = genomic DNA
gttggataaattgatgggtggat

SEQ ID NO: 4755 - DNA, 23 bp, Homo sapiens
  source 1..23: mol_type = genomic DNA
ttggataaattgatgggtggatg

SEQ ID NO: 4756 - DNA, 23 bp, Homo sapiens
  source 1..23: mol_type = genomic DNA
tggataaattgatgggtggatgg

SEQ ID NO: 4757 - DNA, 23 bp, Homo sapiens
  source 1..23: mol_type = genomic DNA
ggataaattgatgggtggatgga

SEQ ID NO: 4758 - DNA, 23 bp, Homo sapiens
  source 1..23: mol_type = genomic DNA
gataaattgatgggtggatggat

SEQ ID NO: 4759 - DNA, 23 bp, Homo sapiens
  source 1..23: mol_type = genomic DNA
ataaattgatgggtggatggatg

SEQ ID NO: 4760 - DNA, 23 bp, Homo sapiens
  source 1..23: mol_type = genomic DNA
taaattgatgggtggatggatgg

SEQ ID NO: 4761 - DNA, 23 bp, Homo sapiens
  source 1..23: mol_type = genomic DNA
aaattgatgggtggatggatggt

SEQ ID NO: 4762 - DNA, 23 bp, Homo sapiens
  source 1..23: mol_type = genomic DNA
aattgatgggtggatggatggtt

SEQ ID NO: 4763 - DNA, 23 bp, Homo sapiens
  source 1..23: mol_type = genomic DNA
attgatgggtggatggatggttg

SEQ ID NO: 4764 - DNA, 23 bp, Homo sapiens
  source 1..23: mol_type = genomic DNA
ttgatgggtggatggatggttgg

SEQ ID NO: 4765 - DNA, 23 bp, Homo sapiens
  source 1..23: mol_type = genomic DNA
tgatgggtggatggatggttggt

SEQ ID NO: 4766 - DNA, 23 bp, Homo sapiens
  source 1..23: mol_type = genomic DNA
gatgggtggatggatggttggtt

SEQ ID NO: 4767 - DNA, 23 bp, Homo sapiens
  source 1..23: mol_type = genomic DNA
atgggtggatggatggttggttg

SEQ ID NO: 4768 - DNA, 23 bp, Homo sapiens
  source 1..23: mol_type = genomic DNA
tgggtggatggatggttggttgt

SEQ ID NO: 4769 - DNA, 23 bp, Homo sapiens
  source 1..23: mol_type = genomic DNA
gggtggatggatggttggttgta

SEQ ID NO: 4770 - DNA, 23 bp, Homo sapiens
  source 1..23: mol_type = genomic DNA
ggtggatggatggttggttgtat

SEQ ID NO: 4771 - DNA, 23 bp, Homo sapiens
  source 1..23: mol_type = genomic DNA
gtggatggatggttggttgtatg

SEQ ID NO: 4772 - DNA, 23 bp, Homo sapiens
  source 1..23: mol_type = genomic DNA
tggatggatggttggttgtatga

SEQ ID NO: 4773 - DNA, 23 bp, Homo sapiens
  source 1..23: mol_type = genomic DNA
ggatggatggttggttgtatgaa

SEQ ID NO: 4774 - DNA, 23 bp, Homo sapiens
  source 1..23: mol_type = genomic DNA
gatggatggttggttgtatgaaa

SEQ ID NO: 4775 - DNA, 23 bp, Homo sapiens
  source 1..23: mol_type = genomic DNA
atggatggttggttgtatgaaag

SEQ ID NO: 4776 - DNA, 23 bp, Homo sapiens
  source 1..23: mol_type = genomic DNA
tggatggttggttgtatgaaaga

SEQ ID NO: 4777 - DNA, 23 bp, Homo sapiens
  source 1..23: mol_type = genomic DNA
ggatggttggttgtatgaaagaa

SEQ ID NO: 4778 - DNA, 23 bp, Homo sapiens
  source 1..23: mol_type = genomic DNA
gatggttggttgtatgaaagaat

SEQ ID NO: 4779 - DNA, 23 bp, Homo sapiens
  source 1..23: mol_type = genomic DNA
atggttggttgtatgaaagaatg

SEQ ID NO: 4780 - DNA, 23 bp, Homo sapiens
  source 1..23: mol_type = genomic DNA
tggttggttgtatgaaagaatga

SEQ ID NO: 4781 - DNA, 23 bp, Homo sapiens
  source 1..23: mol_type = genomic DNA
ggttggttgtatgaaagaatgaa

SEQ ID NO: 4782 - DNA, 23 bp, Homo sapiens
  source 1..23: mol_type = genomic DNA
gttggttgtatgaaagaatgaat

SEQ ID NO: 4783 - DNA, 23 bp, Homo sapiens
  source 1..23: mol_type = genomic DNA
ttggttgtatgaaagaatgaatg

SEQ ID NO: 4784 - DNA, 23 bp, Homo sapiens
  source 1..23: mol_type = genomic DNA
tggttgtatgaaagaatgaatga

SEQ ID NO: 4785 - DNA, 23 bp, Homo sapiens
  source 1..23: mol_type = genomic DNA
ggttgtatgaaagaatgaatgat

SEQ ID NO: 4786 - DNA, 23 bp, Homo sapiens
  source 1..23: mol_type = genomic DNA
gttgtatgaaagaatgaatgatt

SEQ ID NO: 4787 - DNA, 23 bp, Homo sapiens
  source 1..23: mol_type = genomic DNA
ttgtatgaaagaatgaatgattg

SEQ ID NO: 4788 - DNA, 23 bp, Homo sapiens
  source 1..23: mol_type = genomic DNA
tgtatgaaagaatgaatgattgg

SEQ ID NO: 4789 - DNA, 23 bp, Homo sapiens
  source 1..23: mol_type = genomic DNA
gtatgaaagaatgaatgattggg

SEQ ID NO: 4790 - DNA, 23 bp, Homo sapiens
  source 1..23: mol_type = genomic DNA
tatgaaagaatgaatgattgggt

SEQ ID NO: 4791 - DNA, 23 bp, Homo sapiens
  source 1..23: mol_type = genomic DNA
atgaaagaatgaatgattgggta

SEQ ID NO: 4792 - DNA, 23 bp, Homo sapiens
  source 1..23: mol_type = genomic DNA
tgaaagaatgaatgattgggtag

SEQ ID NO: 4793 - DNA, 23 bp, Homo sapiens
  source 1..23: mol_type = genomic DNA
gaaagaatgaatgattgggtagg

SEQ ID NO: 4794 - DNA, 23 bp, Homo sapiens
  source 1..23: mol_type = genomic DNA
aaagaatgaatgattgggtaggt

SEQ ID NO: 4795 - DNA, 23 bp, Homo sapiens
  source 1..23: mol_type = genomic DNA
aagaatgaatgattgggtaggtg

SEQ ID NO: 4796 - DNA, 23 bp, Homo sapiens
  source 1..23: mol_type = genomic DNA
agaatgaatgattgggtaggtgg

SEQ ID NO: 4797 - DNA, 23 bp, Homo sapiens
  source 1..23: mol_type = genomic DNA
gaatgaatgattgggtaggtgga

SEQ ID NO: 4798 - DNA, 23 bp, Homo sapiens
  source 1..23: mol_type = genomic DNA
aatgaatgattgggtaggtggat

SEQ ID NO: 4799 - DNA, 23 bp, Homo sapiens
  source 1..23: mol_type = genomic DNA
atgaatgattgggtaggtggatt

SEQ ID NO: 4800 - DNA, 23 bp, Homo sapiens
  source 1..23: mol_type = genomic DNA
tgaatgattgggtaggtggatta

SEQ ID NO: 4801 - DNA, 23 bp, Homo sapiens
  source 1..23: mol_type = genomic DNA
gaatgattgggtaggtggattaa

SEQ ID NO: 4802 - DNA, 23 bp, Homo sapiens
  source 1..23: mol_type = genomic DNA
aatgattgggtaggtggattaag

SEQ ID NO: 4803 - DNA, 23 bp, Homo sapiens
  source 1..23: mol_type = genomic DNA
atgattgggtaggtggattaagt

SEQ ID NO: 4804 - DNA, 23 bp, Homo sapiens
  source 1..23: mol_type = genomic DNA
tgattgggtaggtggattaagtt

SEQ ID NO: 4805 - DNA, 23 bp, Homo sapiens
  source 1..23: mol_type = genomic DNA
gattgggtaggtggattaagttg

SEQ ID NO: 4806 - DNA, 23 bp, Homo sapiens
  source 1..23: mol_type = genomic DNA
attgggtaggtggattaagttgc

SEQ ID NO: 4807 - DNA, 23 bp, Homo sapiens
  source 1..23: mol_type = genomic DNA
ttgggtaggtggattaagttgcg

SEQ ID NO: 4808 - DNA, 23 bp, Homo sapiens
  source 1..23: mol_type = genomic DNA
tgggtaggtggattaagttgcgg

SEQ ID NO: 4809 - DNA, 23 bp, Homo sapiens
  source 1..23: mol_type = genomic DNA
gggtaggtggattaagttgcgga

SEQ ID NO: 4810 - DNA, 23 bp, Homo sapiens
  source 1..23: mol_type = genomic DNA
ggtaggtggattaagttgcggat

SEQ ID NO: 4811 - DNA, 23 bp, Homo sapiens
  source 1..23: mol_type = genomic DNA
gtaggtggattaagttgcggatc

SEQ ID NO: 4812 - DNA, 23 bp, Homo sapiens
  source 1..23: mol_type = genomic DNA
taggtggattaagttgcggatca

SEQ ID NO: 4813 - DNA, 23 bp, Homo sapiens
  source 1..23: mol_type = genomic DNA
aggtggattaagttgcggatcaa

SEQ ID NO: 4814 - DNA, 23 bp, Homo sapiens
  source 1..23: mol_type = genomic DNA
ggtggattaagttgcggatcaat

SEQ ID NO: 4815 - DNA, 23 bp, Homo sapiens
  source 1..23: mol_type = genomic DNA
gtggattaagttgcggatcaatg

SEQ ID NO: 4816 - DNA, 23 bp, Homo sapiens
  source 1..23: mol_type = genomic DNA
tggattaagttgcggatcaatgt

SEQ ID NO: 4817 - DNA, 23 bp, Homo sapiens
  source 1..23: mol_type = genomic DNA
ggattaagttgcggatcaatgta

SEQ ID NO: 4818 - DNA, 23 bp, Homo sapiens
  source 1..23: mol_type = genomic DNA
gattaagttgcggatcaatgtat

SEQ ID NO: 4819 - DNA, 23 bp, Homo sapiens
  source 1..23: mol_type = genomic DNA
attaagttgcggatcaatgtatg

SEQ ID NO: 4820 - DNA, 23 bp, Homo sapiens
  source 1..23: mol_type = genomic DNA
ttaagttgcggatcaatgtatgg

SEQ ID NO: 4821 - DNA, 23 bp, Homo sapiens
  source 1..23: mol_type = genomic DNA
taagttgcggatcaatgtatggg

SEQ ID NO: 4822 - DNA, 23 bp, Homo sapiens
  source 1..23: mol_type = genomic DNA
aagttgcggatcaatgtatggga

SEQ ID NO: 4823 - DNA, 23 bp, Homo sapiens
  source 1..23: mol_type = genomic DNA
agttgcggatcaatgtatgggat

SEQ ID NO: 4824 - DNA, 23 bp, Homo sapiens
  source 1..23: mol_type = genomic DNA
gttgcggatcaatgtatgggatg

SEQ ID NO: 4825 - DNA, 23 bp, Homo sapiens
  source 1..23: mol_type = genomic DNA
ttgcggatcaatgtatgggatgg

SEQ ID NO: 4826 - DNA, 23 bp, Homo sapiens
  source 1..23: mol_type = genomic DNA
tgcggatcaatgtatgggatgga

SEQ ID NO: 4827 - DNA, 23 bp, Homo sapiens
  source 1..23: mol_type = genomic DNA
gcggatcaatgtatgggatggat

SEQ ID NO: 4828 - DNA, 23 bp, Homo sapiens
  source 1..23: mol_type = genomic DNA
cggatcaatgtatgggatggatg

SEQ ID NO: 4829 - DNA, 23 bp, Homo sapiens
  source 1..23: mol_type = genomic DNA
ggatcaatgtatgggatggatga

SEQ ID NO: 4830 - DNA, 23 bp, Homo sapiens
  source 1..23: mol_type = genomic DNA
gatcaatgtatgggatggatgaa

SEQ ID NO: 4831 - DNA, 23 bp, Homo sapiens
  source 1..23: mol_type = genomic DNA
atcaatgtatgggatggatgaat

SEQ ID NO: 4832 - DNA, 23 bp, Homo sapiens
  source 1..23: mol_type = genomic DNA
tcaatgtatgggatggatgaatg

SEQ ID NO: 4833 - DNA, 23 bp, Homo sapiens
  source 1..23: mol_type = genomic DNA
caatgtatgggatggatgaatgg

SEQ ID NO: 4834 - DNA, 23 bp, Homo sapiens
  source 1..23: mol_type = genomic DNA
aatgtatgggatggatgaatgga

SEQ ID NO: 4835 - DNA, 23 bp, Homo sapiens
  source 1..23: mol_type = genomic DNA
atgtatgggatggatgaatggat

SEQ ID NO: 4836 - DNA, 23 bp, Homo sapiens
  source 1..23: mol_type = genomic DNA
tgtatgggatggatgaatggatg

SEQ ID NO: 4837 - DNA, 23 bp, Homo sapiens
  source 1..23: mol_type = genomic DNA
gtatgggatggatgaatggatgg

SEQ ID NO: 4838 - DNA, 23 bp, Homo sapiens
  source 1..23: mol_type = genomic DNA
tatgggatggatgaatggatgga

SEQ ID NO: 4839 - DNA, 23 bp, Homo sapiens
  source 1..23: mol_type = genomic DNA
atgggatggatgaatggatggat

SEQ ID NO: 4840 - DNA, 23 bp, Homo sapiens
  source 1..23: mol_type = genomic DNA
tgggatggatgaatggatggatg

SEQ ID NO: 4841 - DNA, 23 bp, Homo sapiens
  source 1..23: mol_type = genomic DNA
gggatggatgaatggatggatgg

SEQ ID NO: 4842 - DNA, 23 bp, Homo sapiens
  source 1..23: mol_type = genomic DNA
ggatggatgaatggatggatgga

SEQ ID NO: 4843 - DNA, 23 bp, Homo sapiens
  source 1..23: mol_type = genomic DNA
gatggatgaatggatggatggat

SEQ ID NO: 4844 - DNA, 23 bp, Homo sapiens
  source 1..23: mol_type = genomic DNA
atggatgaatggatggatggatg

SEQ ID NO: 4845 - DNA, 23 bp, Homo sapiens
  source 1..23: mol_type = genomic DNA
tggatgaatggatggatggatgg

SEQ ID NO: 4846 - DNA, 23 bp, Homo sapiens
  source 1..23: mol_type = genomic DNA
ggatgaatggatggatggatgga

SEQ ID NO: 4847 - DNA, 23 bp, Homo sapiens
  source 1..23: mol_type = genomic DNA
gatgaatggatggatggatggat

SEQ ID NO: 4848 - DNA, 23 bp, Homo sapiens
  source 1..23: mol_type = genomic DNA
atgaatggatggatggatggatg

SEQ ID NO: 4849 - DNA, 23 bp, Homo sapiens
  source 1..23: mol_type = genomic DNA
tgaatggatggatggatggatgt

SEQ ID NO: 4850 - DNA, 23 bp, Homo sapiens
  source 1..23: mol_type = genomic DNA
gaatggatggatggatggatgtg

SEQ ID NO: 4851 - DNA, 23 bp, Homo sapiens
  source 1..23: mol_type = genomic DNA
aatggatggatggatggatgtgt

SEQ ID NO: 4852 - DNA, 23 bp, Homo sapiens
  source 1..23: mol_type = genomic DNA
atggatggatggatggatgtgtg

SEQ ID NO: 4853 - DNA, 23 bp, Homo sapiens
  source 1..23: mol_type = genomic DNA
tggatggatggatggatgtgtgg

SEQ ID NO: 4854 - DNA, 23 bp, Homo sapiens
  source 1..23: mol_type = genomic DNA
ggatggatggatggatgtgtggt

SEQ ID NO: 4855 - DNA, 23 bp, Homo sapiens
  source 1..23: mol_type = genomic DNA
gatggatggatggatgtgtggtt

SEQ ID NO: 4856 - DNA, 23 bp, Homo sapiens
  source 1..23: mol_type = genomic DNA
atggatggatggatgtgtggttg

SEQ ID NO: 4857 - DNA, 23 bp, Homo sapiens
  source 1..23: mol_type = genomic DNA
tggatggatggatgtgtggttga

SEQ ID NO: 4858 - DNA, 23 bp, Homo sapiens
  source 1..23: mol_type = genomic DNA
ggatggatggatgtgtggttgaa

SEQ ID NO: 4859 - DNA, 23 bp, Homo sapiens
  source 1..23: mol_type = genomic DNA
gatggatggatgtgtggttgaat

SEQ ID NO: 4860 - DNA, 23 bp, Homo sapiens
  source 1..23: mol_type = genomic DNA
atggatggatgtgtggttgaatt

SEQ ID NO: 4861 - DNA, 23 bp, Homo sapiens
  source 1..23: mol_type = genomic DNA
tggatggatgtgtggttgaatta

SEQ ID NO: 4862 - DNA, 23 bp, Homo sapiens
  source 1..23: mol_type = genomic DNA
ggatggatgtgtggttgaattac

SEQ ID NO: 4863 - DNA, 23 bp, Homo sapiens
  source 1..23: mol_type = genomic DNA
gatggatgtgtggttgaattact

SEQ ID NO: 4864 - DNA, 23 bp, Homo sapiens
  source 1..23: mol_type = genomic DNA
atggatgtgtggttgaattactg

SEQ ID NO: 4865 - DNA, 23 bp, Homo sapiens
  source 1..23: mol_type = genomic DNA
tggatgtgtggttgaattactga

SEQ ID NO: 4866 - DNA, 23 bp, Homo sapiens
  source 1..23: mol_type = genomic DNA
ggatgtgtggttgaattactgaa

SEQ ID NO: 4867 - DNA, 23 bp, Homo sapiens
  source 1..23: mol_type = genomic DNA
gatgtgtggttgaattactgaaa

SEQ ID NO: 4868 - DNA, 23 bp, Homo sapiens
  source 1..23: mol_type = genomic DNA
atgtgtggttgaattactgaaag

SEQ ID NO: 4869 - DNA, 23 bp, Homo sapiens
  source 1..23: mol_type = genomic DNA
tgtgtggttgaattactgaaagg

SEQ ID NO: 4870 - DNA, 23 bp, Homo sapiens
  source 1..23: mol_type = genomic DNA
gtgtggttgaattactgaaaggt

SEQ ID NO: 4871 - DNA, 23 bp, Homo sapiens
  source 1..23: mol_type = genomic DNA
tgtggttgaattactgaaaggtt

SEQ ID NO: 4872 - DNA, 23 bp, Homo sapiens
  source 1..23: mol_type = genomic DNA
gtggttgaattactgaaaggttg

SEQ ID NO: 4873 - DNA, 23 bp, Homo sapiens
  source 1..23: mol_type = genomic DNA
tggttgaattactgaaaggttgg

SEQ ID NO: 4874 - DNA, 23 bp, Homo sapiens
  source 1..23: mol_type = genomic DNA
ggttgaattactgaaaggttgga

SEQ ID NO: 4875 - DNA, 23 bp, Homo sapiens
  source 1..23: mol_type = genomic DNA
gttgaattactgaaaggttggaa

SEQ ID NO: 4876 - DNA, 23 bp, Homo sapiens
  source 1..23: mol_type = genomic DNA
ttgaattactgaaaggttggaag

SEQ ID NO: 4877 - DNA, 23 bp, Homo sapiens
  source 1..23: mol_type = genomic DNA
tgaattactgaaaggttggaaga

SEQ ID NO: 4878 - DNA, 23 bp, Homo sapiens
  source 1..23: mol_type = genomic DNA
gaattactgaaaggttggaagag

SEQ ID NO: 4879 - DNA, 23 bp, Homo sapiens
  source 1..23: mol_type = genomic DNA
aattactgaaaggttggaagagt

SEQ ID NO: 4880 - DNA, 23 bp, Homo sapiens
  source 1..23: mol_type = genomic DNA
attactgaaaggttggaagagtg

SEQ ID NO: 4881 - DNA, 23 bp, Homo sapiens
  source 1..23: mol_type = genomic DNA
ttactgaaaggttggaagagtgg

SEQ ID NO: 4882 - DNA, 23 bp, Homo sapiens
  source 1..23: mol_type = genomic DNA
tactgaaaggttggaagagtgga

SEQ ID NO: 4883 - DNA, 23 bp, Homo sapiens
  source 1..23: mol_type = genomic DNA
actgaaaggttggaagagtggat

SEQ ID NO: 4884 - DNA, 23 bp, Homo sapiens
  source 1..23: mol_type = genomic DNA
ctgaaaggttggaagagtggatg

SEQ ID NO: 4885 - DNA, 23 bp, Homo sapiens
  source 1..23: mol_type = genomic DNA
tgaaaggttggaagagtggatgg

SEQ ID NO: 4886 - DNA, 23 bp, Homo sapiens
  source 1..23: mol_type = genomic DNA
gaaaggttggaagagtggatggg

SEQ ID NO: 4887 - DNA, 23 bp, Homo sapiens
  source 1..23: mol_type = genomic DNA
aaaggttggaagagtggatgggt

SEQ ID NO: 4888 - DNA, 23 bp, Homo sapiens
  source 1..23: mol_type = genomic DNA
aaggttggaagagtggatgggtg

SEQ ID NO: 4889 - DNA, 23 bp, Homo sapiens
  source 1..23: mol_type = genomic DNA
aggttggaagagtggatgggtga

SEQ ID NO: 4890 - DNA, 23 bp, Homo sapiens
  source 1..23: mol_type = genomic DNA
ggttggaagagtggatgggtgaa

SEQ ID NO: 4891 - DNA, 23 bp, Homo sapiens
  source 1..23: mol_type = genomic DNA
gttggaagagtggatgggtgaaa

SEQ ID NO: 4892 - DNA, 23 bp, Homo sapiens
  source 1..23: mol_type = genomic DNA
ttggaagagtggatgggtgaaat

SEQ ID NO: 4893 - DNA, 23 bp, Homo sapiens
  source 1..23: mol_type = genomic DNA
tggaagagtggatgggtgaaatt

SEQ ID NO: 4894 - DNA, 23 bp, Homo sapiens
  source 1..23: mol_type = genomic DNA
ggaagagtggatgggtgaaattt

SEQ ID NO: 4895 - DNA, 23 bp, Homo sapiens
  source 1..23: mol_type = genomic DNA
gaagagtggatgggtgaaatttg

SEQ ID NO: 4896 - DNA, 23 bp, Homo sapiens
  source 1..23: mol_type = genomic DNA
aagagtggatgggtgaaatttgg

SEQ ID NO: 4897 - DNA, 23 bp, Homo sapiens
  source 1..23: mol_type = genomic DNA
agagtggatgggtgaaatttggg

SEQ ID NO: 4898 - DNA, 23 bp, Homo sapiens
  source 1..23: mol_type = genomic DNA
gagtggatgggtgaaatttgggg

SEQ ID NO: 4899 - DNA, 23 bp, Homo sapiens
  source 1..23: mol_type = genomic DNA
agtggatgggtgaaatttggggt

SEQ ID NO: 4900 - DNA, 23 bp, Homo sapiens
  source 1..23: mol_type = genomic DNA
gtggatgggtgaaatttggggta

SEQ ID NO: 4901 - DNA, 23 bp, Homo sapiens
  source 1..23: mol_type = genomic DNA
tggatgggtgaaatttggggtag

SEQ ID NO: 4902 - DNA, 23 bp, Homo sapiens
  source 1..23: mol_type = genomic DNA
ggatgggtgaaatttggggtagt

SEQ ID NO: 4903 - DNA, 23 bp, Homo sapiens
  source 1..23: mol_type = genomic DNA
gatgggtgaaatttggggtagtt

SEQ ID NO: 4904 - DNA, 23 bp, Homo sapiens
  source 1..23: mol_type = genomic DNA
atgggtgaaatttggggtagtta

SEQ ID NO: 4905 - DNA, 23 bp, Homo sapiens
  source 1..23: mol_type = genomic DNA
tgggtgaaatttggggtagttag

SEQ ID NO: 4906 - DNA, 23 bp, Homo sapiens
  source 1..23: mol_type = genomic DNA
gggtgaaatttggggtagttaga

SEQ ID NO: 4907 - DNA, 23 bp, Homo sapiens
  source 1..23: mol_type = genomic DNA
ggtgaaatttggggtagttagat

SEQ ID NO: 4908 - DNA, 23 bp, Homo sapiens
  source 1..23: mol_type = genomic DNA
gtgaaatttggggtagttagatg

SEQ ID NO: 4909 - DNA, 23 bp, Homo sapiens
  source 1..23: mol_type = genomic DNA
tgaaatttggggtagttagatgg

SEQ ID NO: 4910 - DNA, 23 bp, Homo sapiens
  source 1..23: mol_type = genomic DNA
gaaatttggggtagttagatggg

SEQ ID NO: 4911 - DNA, 23 bp, Homo sapiens
  source 1..23: mol_type = genomic DNA
aaatttggggtagttagatgggt

SEQ ID NO: 4912 - DNA, 23 bp, Homo sapiens
  source 1..23: mol_type = genomic DNA
aatttggggtagttagatgggtg

SEQ ID NO: 4913 - DNA, 23 bp, Homo sapiens
  source 1..23: mol_type = genomic DNA
atttggggtagttagatgggtgg

SEQ ID NO: 4914 - DNA, 23 bp, Homo sapiens
  source 1..23: mol_type = genomic DNA
tttggggtagttagatgggtggg

SEQ ID NO: 4915 - DNA, 23 bp, Homo sapiens
  source 1..23: mol_type = genomic DNA
ttggggtagttagatgggtgggt

SEQ ID NO: 4916 - DNA, 23 bp, Homo sapiens
  source 1..23: mol_type = genomic DNA
tggggtagttagatgggtgggtg

SEQ ID NO: 4917 - DNA, 23 bp, Homo sapiens
  source 1..23: mol_type = genomic DNA
ggggtagttagatgggtgggtgt

SEQ ID NO: 4918 - DNA, 23 bp, Homo sapiens
  source 1..23: mol_type = genomic DNA
gggtagttagatgggtgggtgtg

SEQ ID NO: 4919 - DNA, 23 bp, Homo sapiens
  source 1..23: mol_type = genomic DNA
ggtagttagatgggtgggtgtgt

SEQ ID NO: 4920 - DNA, 23 bp, Homo sapiens
  source 1..23: mol_type = genomic DNA
gtagttagatgggtgggtgtgtg

SEQ ID NO: 4921 - DNA, 23 bp, Homo sapiens
  source 1..23: mol_type = genomic DNA
tagttagatgggtgggtgtgtgg

SEQ ID NO: 4922 - DNA, 23 bp, Homo sapiens
  source 1..23: mol_type = genomic DNA
agttagatgggtgggtgtgtgga

SEQ ID NO: 4923 - DNA, 23 bp, Homo sapiens
  source 1..23: mol_type = genomic DNA
gttagatgggtgggtgtgtggat

SEQ ID NO: 4924 - DNA, 23 bp, Homo sapiens
  source 1..23: mol_type = genomic DNA
ttagatgggtgggtgtgtggatg

SEQ ID NO: 4925 - DNA, 23 bp, Homo sapiens
  source 1..23: mol_type = genomic DNA
tagatgggtgggtgtgtggatgg

SEQ ID NO: 4926 - DNA, 23 bp, Homo sapiens
  source 1..23: mol_type = genomic DNA
agatgggtgggtgtgtggatgga

SEQ ID NO: 4927 - DNA, 23 bp, Homo sapiens
  source 1..23: mol_type = genomic DNA
gatgggtgggtgtgtggatggat

SEQ ID NO: 4928 - DNA, 23 bp, Homo sapiens
  source 1..23: mol_type = genomic DNA
atgggtgggtgtgtggatggata

SEQ ID NO: 4929 - DNA, 23 bp, Homo sapiens
  source 1..23: mol_type = genomic DNA
tgggtgggtgtgtggatggataa

SEQ ID NO: 4930 - DNA, 23 bp, Homo sapiens
  source 1..23: mol_type = genomic DNA
gggtgggtgtgtggatggataaa

SEQ ID NO: 4931 - DNA, 23 bp, Homo sapiens
  source 1..23: mol_type = genomic DNA
ggtgggtgtgtggatggataaaa

SEQ ID NO: 4932 - DNA, 23 bp, Homo sapiens
  source 1..23: mol_type = genomic DNA
gtgggtgtgtggatggataaaag

SEQ ID NO: 4933 - DNA, 23 bp, Homo sapiens
  source 1..23: mol_type = genomic DNA
tgggtgtgtggatggataaaaga

SEQ ID NO: 4934 - DNA, 23 bp, Homo sapiens
  source 1..23: mol_type = genomic DNA
gggtgtgtggatggataaaagag

SEQ ID NO: 4935 - DNA, 23 bp, Homo sapiens
  source 1..23: mol_type = genomic DNA
ggtgtgtggatggataaaagagt

SEQ ID NO: 4936 - DNA, 23 bp, Homo sapiens
  source 1..23: mol_type = genomic DNA
gtgtgtggatggataaaagagta

SEQ ID NO: 4937 - DNA, 23 bp, Homo sapiens
  source 1..23: mol_type = genomic DNA
tgtgtggatggataaaagagtag

SEQ ID NO: 4938 - DNA, 23 bp, Homo sapiens
  source 1..23: mol_type = genomic DNA
gtgtggatggataaaagagtaga

SEQ ID NO: 4939 - DNA, 23 bp, Homo sapiens
  source 1..23: mol_type = genomic DNA
tgtggatggataaaagagtagat

SEQ ID NO: 4940 - DNA, 23 bp, Homo sapiens
  source 1..23: mol_type = genomic DNA
gtggatggataaaagagtagatg

SEQ ID NO: 4941 - DNA, 23 bp, Homo sapiens
  source 1..23: mol_type = genomic DNA
tggatggataaaagagtagatga

SEQ ID NO: 4942 - DNA, 23 bp, Homo sapiens
  source 1..23: mol_type = genomic DNA
ggatggataaaagagtagatgaa

SEQ ID NO: 4943 - DNA, 23 bp, Homo sapiens
  source 1..23: mol_type = genomic DNA
gatggataaaagagtagatgaat

SEQ ID NO: 4944 - DNA, 23 bp, Homo sapiens
  source 1..23: mol_type = genomic DNA
atggataaaagagtagatgaatg

SEQ ID NO: 4945 - DNA, 23 bp, Homo sapiens
  source 1..23: mol_type = genomic DNA
tggataaaagagtagatgaatga

SEQ ID NO: 4946 - DNA, 23 bp, Homo sapiens
  source 1..23: mol_type = genomic DNA
ggataaaagagtagatgaatgaa

SEQ ID NO: 4947 - DNA, 23 bp, Homo sapiens
  source 1..23: mol_type = genomic DNA
gataaaagagtagatgaatgaat

SEQ ID NO: 4948 - DNA, 23 bp, Homo sapiens
  source 1..23: mol_type = genomic DNA
ataaaagagtagatgaatgaatt

SEQ ID NO: 4949 - DNA, 23 bp, Homo sapiens
  source 1..23: mol_type = genomic DNA
taaaagagtagatgaatgaatta

SEQ ID NO: 4950 - DNA, 23 bp, Homo sapiens
  source 1..23: mol_type = genomic DNA
aaaagagtagatgaatgaattaa

SEQ ID NO: 4951 - DNA, 23 bp, Homo sapiens
  source 1..23: mol_type = genomic DNA
aaagagtagatgaatgaattaat

SEQ ID NO: 4952 - DNA, 23 bp, Homo sapiens
  source 1..23: mol_type = genomic DNA
aagagtagatgaatgaattaatg

SEQ ID NO: 4953 - DNA, 23 bp, Homo sapiens
  source 1..23: mol_type = genomic DNA
agagtagatgaatgaattaatga

SEQ ID NO: 4954 - DNA, 23 bp, Homo sapiens
  source 1..23: mol_type = genomic DNA
gagtagatgaatgaattaatgaa

SEQ ID NO: 4955 - DNA, 23 bp, Homo sapiens
  source 1..23: mol_type = genomic DNA
agtagatgaatgaattaatgaat

SEQ ID NO: 4956 - DNA, 23 bp, Homo sapiens
  source 1..23: mol_type = genomic DNA
gtagatgaatgaattaatgaata

SEQ ID NO: 4957 - DNA, 23 bp, Homo sapiens
  source 1..23: mol_type = genomic DNA
tagatgaatgaattaatgaataa

SEQ ID NO: 4958 - DNA, 23 bp, Homo sapiens
  source 1..23: mol_type = genomic DNA
agatgaatgaattaatgaataaa

SEQ ID NO: 4959 - DNA, 23 bp, Homo sapiens
  source 1..23: mol_type = genomic DNA
gatgaatgaattaatgaataaac

SEQ ID NO: 4960 - DNA, 23 bp, Homo sapiens
  source 1..23: mol_type = genomic DNA
atgaatgaattaatgaataaaca

SEQ ID NO: 4961 - DNA, 23 bp, Homo sapiens
  source 1..23: mol_type = genomic DNA
tgaatgaattaatgaataaacag

SEQ ID NO: 4962 - DNA, 23 bp, Homo sapiens
  source 1..23: mol_type = genomic DNA
gaatgaattaatgaataaacagg

SEQ ID NO: 4963 - DNA, 23 bp, Homo sapiens
  source 1..23: mol_type = genomic DNA
aatgaattaatgaataaacaggc

SEQ ID NO: 4964 - DNA, 23 bp, Homo sapiens
  source 1..23: mol_type = genomic DNA
atgaattaatgaataaacaggca

SEQ ID NO: 4965 - DNA, 23 bp, Homo sapiens
  source 1..23: mol_type = genomic DNA
tgaattaatgaataaacaggcag

SEQ ID NO: 4966 - DNA, 23 bp, Homo sapiens
  source 1..23: mol_type = genomic DNA
gaattaatgaataaacaggcaga

SEQ ID NO: 4967 - DNA, 23 bp, Homo sapiens
  source 1..23: mol_type = genomic DNA
aattaatgaataaacaggcagat

SEQ ID NO: 4968 - DNA, 23 bp, Homo sapiens
  source 1..23: mol_type = genomic DNA
attaatgaataaacaggcagatg

SEQ ID NO: 4969 - DNA, 23 bp, Homo sapiens
  source 1..23: mol_type = genomic DNA
ttaatgaataaacaggcagatgg

SEQ ID NO: 4970 - DNA, 23 bp, Homo sapiens
  source 1..23: mol_type = genomic DNA
taatgaataaacaggcagatgga

SEQ ID NO: 4971 - DNA, 23 bp, Homo sapiens
  source 1..23: mol_type = genomic DNA
aatgaataaacaggcagatggat

SEQ ID NO: 4972 - DNA, 23 bp, Homo sapiens
  source 1..23: mol_type = genomic DNA
atgaataaacaggcagatggatg

SEQ ID NO: 4973 - DNA, 23 bp, Homo sapiens
  source 1..23: mol_type = genomic DNA
tgaataaacaggcagatggatga

SEQ ID NO: 4974 - DNA, 23 bp, Homo sapiens
  source 1..23: mol_type = genomic DNA
gaataaacaggcagatggatgat

SEQ ID NO: 4975 - DNA, 23 bp, Homo sapiens
  source 1..23: mol_type = genomic DNA
aataaacaggcagatggatgatg

SEQ ID NO: 4976 - DNA, 23 bp, Homo sapiens
  source 1..23: mol_type = genomic DNA
ataaacaggcagatggatgatgt

SEQ ID NO: 4977 - DNA, 23 bp, Homo sapiens
  source 1..23: mol_type = genomic DNA
taaacaggcagatggatgatgta

SEQ ID NO: 4978 - DNA, 23 bp, Homo sapiens
  source 1..23: mol_type = genomic DNA
aaacaggcagatggatgatgtaa

SEQ ID NO: 4979 - DNA, 23 bp, Homo sapiens
  source 1..23: mol_type = genomic DNA
aacaggcagatggatgatgtaag

SEQ ID NO: 4980 - DNA, 23 bp, Homo sapiens
  source 1..23: mol_type = genomic DNA
acaggcagatggatgatgtaagc

SEQ ID NO: 4981 - DNA, 23 bp, Homo sapiens
  source 1..23: mol_type = genomic DNA
caggcagatggatgatgtaagct

SEQ ID NO: 4982 - DNA, 23 bp, Homo sapiens
  source 1..23: mol_type = genomic DNA
aggcagatggatgatgtaagctg

SEQ ID NO: 4983 - DNA, 23 bp, Homo sapiens
  source 1..23: mol_type = genomic DNA
ggcagatggatgatgtaagctgc

SEQ ID NO: 4984 - DNA, 23 bp, Homo sapiens
  source 1..23: mol_type = genomic DNA
gcagatggatgatgtaagctgcc

SEQ ID NO: 4985 - DNA, 23 bp, Homo sapiens
  source 1..23: mol_type = genomic DNA
cagatggatgatgtaagctgccc

SEQ ID NO: 4986 - DNA, 23 bp, Homo sapiens
  source 1..23: mol_type = genomic DNA
agatggatgatgtaagctgcccc

SEQ ID NO: 4987 - DNA, 23 bp, Homo sapiens
  source 1..23: mol_type = genomic DNA
gatggatgatgtaagctgcccca

SEQ ID NO: 4988 - DNA, 23 bp, Homo sapiens
  source 1..23: mol_type = genomic DNA
atggatgatgtaagctgccccag

SEQ ID NO: 4989 - DNA, 23 bp, Homo sapiens
  source 1..23: mol_type = genomic DNA
tggatgatgtaagctgccccaga

SEQ ID NO: 4990 - DNA, 23 bp, Homo sapiens
  source 1..23: mol_type = genomic DNA
ggatgatgtaagctgccccagac

SEQ ID NO: 4991 - DNA, 23 bp, Homo sapiens
  source 1..23: mol_type = genomic DNA
gatgatgtaagctgccccagacc

SEQ ID NO: 4992 - DNA, 23 bp, Homo sapiens
  source 1..23: mol_type = genomic DNA
atgatgtaagctgccccagaccc

SEQ ID NO: 4993 - DNA, 23 bp, Homo sapiens
  source 1..23: mol_type = genomic DNA
tgatgtaagctgccccagaccct

SEQ ID NO: 4994 - DNA, 23 bp, Homo sapiens
  source 1..23: mol_type = genomic DNA
gatgtaagctgccccagaccctg

SEQ ID NO: 4995 - DNA, 23 bp, Homo sapiens
  source 1..23: mol_type = genomic DNA
atgtaagctgccccagaccctgg

SEQ ID NO: 4996 - DNA, 23 bp, Homo sapiens
  source 1..23: mol_type = genomic DNA
tgtaagctgccccagaccctggg

SEQ ID NO: 4997 - DNA, 23 bp, Homo sapiens
  source 1..23: mol_type = genomic DNA
gtaagctgccccagaccctggga

SEQ ID NO: 4998 - DNA, 23 bp, Homo sapiens
  source 1..23: mol_type = genomic DNA
taagctgccccagaccctgggac

SEQ ID NO: 4999 - DNA, 23 bp, Homo sapiens
  source 1..23: mol_type = genomic DNA
aagctgccccagaccctgggacc

SEQ ID NO: 5000 - DNA, 23 bp, Homo sapiens
  source 1..23: mol_type = genomic DNA
agctgccccagaccctgggacct

SEQ ID NO: 5001 - DNA, 23 bp, Homo sapiens
  source 1..23: mol_type = genomic DNA
gctgccccagaccctgggacctc

SEQ ID NO: 5002 - DNA, 23 bp, Homo sapiens
  source 1..23: mol_type = genomic DNA
ctgccccagaccctgggacctct

SEQ ID NO: 5003 - DNA, 23 bp, Homo sapiens
  source 1..23: mol_type = genomic DNA
tgccccagaccctgggacctctg

SEQ ID NO: 5004 - DNA, 23 bp, Homo sapiens
  source 1..23: mol_type = genomic DNA
gccccagaccctgggacctctga

SEQ ID NO: 5005 - DNA, 23 bp, Homo sapiens
  source 1..23: mol_type = genomic DNA
ccccagaccctgggacctctgac

SEQ ID NO: 5006 - DNA, 23 bp, Homo sapiens
  source 1..23: mol_type = genomic DNA
cccagaccctgggacctctgacc

SEQ ID NO: 5007 - DNA, 23 bp, Homo sapiens
  source 1..23: mol_type = genomic DNA
ccagaccctgggacctctgaccc

SEQ ID NO: 5008 - DNA, 23 bp, Homo sapiens
  source 1..23: mol_type = genomic DNA
cagaccctgggacctctgacccc

SEQ ID NO: 5009 - DNA, 23 bp, Homo sapiens
  source 1..23: mol_type = genomic DNA
agaccctgggacctctgaccccc

SEQ ID NO: 5010 - DNA, 23 bp, Homo sapiens
  source 1..23: mol_type = genomic DNA
gaccctgggacctctgacccccg

SEQ ID NO: 5011 - DNA, 23 bp, Homo sapiens
  source 1..23: mol_type = genomic DNA
accctgggacctctgacccccgg

SEQ ID NO: 5012 - DNA, 23 bp, Homo sapiens
  source 1..23: mol_type = genomic DNA
ccctgggacctctgacccccggc

SEQ ID NO: 5013 - DNA, 23 bp, Homo sapiens
  source 1..23: mol_type = genomic DNA
cctgggacctctgacccccggcg

SEQ ID NO: 5014 - DNA, 23 bp, Homo sapiens
  source 1..23: mol_type = genomic DNA
ctgggacctctgacccccggcga

SEQ ID NO: 5015 - DNA, 23 bp, Homo sapiens
  source 1..23: mol_type = genomic DNA
tgggacctctgacccccggcgac

SEQ ID NO: 5016 - DNA, 23 bp, Homo sapiens
  source 1..23: mol_type = genomic DNA
gggacctctgacccccggcgacc

SEQ ID NO: 5017 - DNA, 23 bp, Homo sapiens
  source 1..23: mol_type = genomic DNA
ggacctctgacccccggcgaccc

SEQ ID NO: 5018 - DNA, 23 bp, Homo sapiens
  source 1..23: mol_type = genomic DNA
gacctctgacccccggcgacccc

SEQ ID NO: 5019 - DNA, 23 bp, Homo sapiens
  source 1..23: mol_type = genomic DNA
acctctgacccccggcgacccct

SEQ ID NO: 5020 - DNA, 23 bp, Homo sapiens
  source 1..23: mol_type = genomic DNA
cctctgacccccggcgacccctt

SEQ ID NO: 5021 - DNA, 23 bp, Homo sapiens
  source 1..23: mol_type = genomic DNA
ctctgacccccggcgaccccttg

SEQ ID NO: 5022 - DNA, 23 bp, Homo sapiens
  source 1..23: mol_type = genomic DNA
tctgacccccggcgaccccttgc

SEQ ID NO: 5023 - DNA, 23 bp, Homo sapiens
  source 1..23: mol_type = genomic DNA
ctgacccccggcgaccccttgca

SEQ ID NO: 5024 - DNA, 23 bp, Homo sapiens
  source 1..23: mol_type = genomic DNA
tgacccccggcgaccccttgcac

SEQ ID NO: 5025 - DNA, 23 bp, Homo sapiens
  source 1..23: mol_type = genomic DNA
gacccccggcgaccccttgcact

SEQ ID NO: 5026 - DNA, 23 bp, Homo sapiens
  source 1..23: mol_type = genomic DNA
acccccggcgaccccttgcactc

SEQ ID NO: 5027 - DNA, 23 bp, Homo sapiens
  source 1..23: mol_type = genomic DNA
cccccggcgaccccttgcactct

SEQ ID NO: 5028 - DNA, 23 bp, Homo sapiens
  source 1..23: mol_type = genomic DNA
ccccggcgaccccttgcactctc

SEQ ID NO: 5029 - DNA, 23 bp, Homo sapiens
  source 1..23: mol_type = genomic DNA
cccggcgaccccttgcactctcc

SEQ ID NO: 5030 - DNA, 23 bp, Homo sapiens
  source 1..23: mol_type = genomic DNA
ccggcgaccccttgcactctcca

SEQ ID NO: 5031 - DNA, 23 bp, Homo sapiens
  source 1..23: mol_type = genomic DNA
cggcgaccccttgcactctccat

SEQ ID NO: 5032 - DNA, 23 bp, Homo sapiens
  source 1..23: mol_type = genomic DNA
ggcgaccccttgcactctccatg

SEQ ID NO: 5033 - DNA, 23 bp, Homo sapiens
  source 1..23: mol_type = genomic DNA
gcgaccccttgcactctccatga

SEQ ID NO: 5034 - DNA, 23 bp, Homo sapiens
  source 1..23: mol_type = genomic DNA
cgaccccttgcactctccatgac

SEQ ID NO: 5035 - DNA, 23 bp, Homo sapiens
  source 1..23: mol_type = genomic DNA
gaccccttgcactctccatgaca

SEQ ID NO: 5036 - DNA, 23 bp, Homo sapiens
  source 1..23: mol_type = genomic DNA
accccttgcactctccatgacac

SEQ ID NO: 5037 - DNA, 23 bp, Homo sapiens
  source 1..23: mol_type = genomic DNA
ccccttgcactctccatgacact

SEQ ID NO: 5038 - DNA, 23 bp, Homo sapiens
  source 1..23: mol_type = genomic DNA
cccttgcactctccatgacactt

SEQ ID NO: 5039 - DNA, 23 bp, Homo sapiens
  source 1..23: mol_type = genomic DNA
ccttgcactctccatgacacttt

SEQ ID NO: 5040 - DNA, 23 bp, Homo sapiens
  source 1..23: mol_type = genomic DNA
cttgcactctccatgacactttc

SEQ ID NO: 5041 - DNA, 23 bp, Homo sapiens
  source 1..23: mol_type = genomic DNA
ttgcactctccatgacactttct

SEQ ID NO: 5042 - DNA, 23 bp, Homo sapiens
  source 1..23: mol_type = genomic DNA
tgcactctccatgacactttctc

SEQ ID NO: 5043 - DNA, 23 bp, Homo sapiens
  source 1..23: mol_type = genomic DNA
gcactctccatgacactttctct

SEQ ID NO: 5044 - DNA, 23 bp, Homo sapiens
  source 1..23: mol_type = genomic DNA
cactctccatgacactttctctc

SEQ ID NO: 5045 - DNA, 23 bp, Homo sapiens
  source 1..23: mol_type = genomic DNA
actctccatgacactttctctcc

SEQ ID NO: 5046 - DNA, 23 bp, Homo sapiens
  source 1..23: mol_type = genomic DNA
ctctccatgacactttctctccc

SEQ ID NO: 5047 - DNA, 23 bp, Homo sapiens
  source 1..23: mol_type = genomic DNA
tctccatgacactttctctccca

SEQ ID NO: 5048 - DNA, 23 bp, Homo sapiens
  source 1..23: mol_type = genomic DNA
ctccatgacactttctctcccat

SEQ ID NO: 5049 - DNA, 23 bp, Homo sapiens
  source 1..23: mol_type = genomic DNA
tccatgacactttctctcccatg

SEQ ID NO: 5050 - DNA, 23 bp, Homo sapiens
  source 1..23: mol_type = genomic DNA
ccatgacactttctctcccatgg

SEQ ID NO: 5051 - DNA, 23 bp, Homo sapiens
  source 1..23: mol_type = genomic DNA
catgacactttctctcccatggt

SEQ ID NO: 5052 - DNA, 23 bp, Homo sapiens
  source 1..23: mol_type = genomic DNA
atgacactttctctcccatggtg

SEQ ID NO: 5053 - DNA, 23 bp, Homo sapiens
  source 1..23: mol_type = genomic DNA
tgacactttctctcccatggtgg

SEQ ID NO: 5054 - DNA, 23 bp, Homo sapiens
  source 1..23: mol_type = genomic DNA
gacactttctctcccatggtggc

SEQ ID NO: 5055 - DNA, 23 bp, Homo sapiens
  source 1..23: mol_type = genomic DNA
acactttctctcccatggtggca

SEQ ID NO: 5056 - DNA, 23 bp, Homo sapiens
  source 1..23: mol_type = genomic DNA
cactttctctcccatggtggcag

SEQ ID NO: 5057 - RNA, 9985 nt, Homo sapiens
  source 1..9985: mol_type = mRNA
gcccccggtgctgaaccaagatggccggtggcggccgggccccggcgtgagccaagcgcgggctgcagccgggagatgccccagcccagcggccgctgagcccgacccgacagagccggcccggccgcctccggcccacctgcgagctcggagacatgtctctgctttgcgttggagtcaaaaaagccaagtttgatggtgcccaagagaaattcaacacgtacgtgaccctgaaagtgcagaatgtcaagagcacgaccatcgcggtgcggggcagccagcccagctgggagcaggatttcatgttcgagattaaccgtctggatttgggactgacggtggaggtgtggaataagggtctcatctgggacacaatggtgggcactgtgtggatcccactgaggaccatccgccagtccaatgaggagggccctggagagtggctgacgctggactcccaggtcatcatggcagacagtgagatctgtggcaccaaggaccccaccttccaccgcatcctcctggacacgcgctttgagctacccttagacattcctgaagaggaggctcgctactgggccaagaagctggagcagctcaatgctatgcgggaccaggatgaatattcgttccaagatgagcaagacaagcctctgcctgtccccagcaaccagtgctgcaactggaattattttggctggggtgagcagcacaacgatgaccccgacagtgcagtggatgatcgtgacagtgactaccgcagtgaaacgagcaacagcatcccgccgccctattatactacgtcacaacccaacgcctcagtccaccaatattctgttcgcccaccacccctgggctcccgggagtcctacagtgactccatgcacagttacgaggagttctctgagccacaagccctcagccccacgggtagcagccgctatgcctcttccggggagctgagccagggaagctctcagctgagcgaggacttcgaccctgacgagcacagcctgcagggctccgacatggaggatgagcgggaccgggactcctaccactcctgccacagctcggtcagctaccacaaagactcgcctcgctgggaccaggatgaggaagagctggaggaggacctggaggacttcctggaggaggaggagctgcctgaagatgaggaggagctggaggaggaggaggaggaggtgcctgacgatttgggcagctatgcccagcgtgaagacgtagctgtggctgagcccaaagacttcaaacgcatcagcctcccgccagctgccccagggaaggaggacaaggccccagtggcacccaccgaggcccccgacatggccaaggtggcccccaagccagccacgcccgacaaggtgcctgcagctgagcagatccctgaggctgagccacccaaggacgaggagagtttcaggccgagagaggatgaggaaggccaggaggggcaggactccatgtccagggccaaggccaactggctgcgtgccttcaacaaggtgcggatgcagctgcaggaggcccggggagaaggagagatgtctaaatccctatggttcaaaggcggcccagggggcggtctcatcatcatcgacagcatgccagacatccgcaagaggaaacctatcccactcgtgagcgacttggccatgtccctggtccagtccaggaaagcgggcatcacctcggccttggcctccagcacgttgaacaacgaggagctgaaaaaccacgtttacaagaagaccctgcaagccttaatctaccccatctcgtgcacgacgccacacaacttcgaagtgtggacggccaccacgcccacctactgctacgagtgcgaggggctgctgtggggcatcgcgaggcagggcatgcgctgcaccgagtgcggtgtcaagtgccacgagaagtgccaggacctgctcaacgccgactgcctgcagcgggctgcggagaagagctccaagcacggggcggaggaccggacacagaacatcatcatggtgctcaaggaccgcatgaagatccgggagcgcaacaagcccgagatcttcgagctcatccaggagatcttcgcggtgaccaagacggcgcacacgcagcagatgaaggcggtcaagcagagcgtgctggacggcacgtccaagtggtccgccaagatcagcatcaccgtggtctgcgcccagggcttgcaggcaaaggacaagacaggatccagtgacccctatgtcaccgtccaggtcgggaagaccaagaaacggacaaaaaccatctatgggaacctcaacccggtgtgggaggagaatttccactttgaatgtcacaattcctccgaccgcatcaaggtgcgcgtctgggacgaggatgacgacatcaaatcccgcgtgaaacagaggttcaagagggaatctgacgatttcctggggcagacgatcattgaggtgcggacgctcagcggcgagatggacgtgtggtacaacctggacaagcgaactgacaaatctgccgtgtcgggtgccatccggctccacatcagtgtggagatcaaaggcgaggagaaggtggccccgtaccatgtccagtacacctgtctgcatgagaacctgttccacttcgtgaccgacgtgcagaacaatggggtcgtgaagatcccagatgccaagggtgacgatgcctggaaggtttactacgatgagacagcccaggagattgtggacgagtttgccatgcgctacggcgtcgagtccatctaccaagccatgacccactttgcctgcctctcctccaagtatatgtgcccaggggtgcctgccgtcatgagcaccctgctcgccaacatcaatgcctactacgcacacaccaccgcctccaccaacgtgtctgcctccgaccgcttcgccgcctccaactttgggaaagagcgcttcgtgaaactcctggaccagctgcataactccctgcggattgacctctccatgtaccggaataacttcccagccagcagcccggagagactccaggacctcaaatccactgtggaccttctcaccagcatcaccttctttcggatgaaggtacaagaactccagagcccgccccgagccagccaggtggtaaaggactgtgtgaaagcctgccttaattctacctacgagtacatcttcaataactgccatgaactgtacagccgggagtaccagacagacccggccaagaagggggaagttctcccagaggaacaggggcccagcatcaagaacctcgacttctggtccaagctgattaccctcatagtgtccatcattgaggaagacaagaattcctacactccctgcctcaaccagtttccccaggagctgaatgtgggtaaaatcagcgctgaagtgatgtggaatctgtttgcccaagacatgaagtacgccatggaggagcacgacaagcatcgtctatgcaagagtgccgactacatgaacctccacttcaaggtgaaatggctctacaatgagtatgtgacggaacttcccgccttcaaggaccgcgtgcctgagtaccctgcatggtttgaacccttcgtcatccagtggctggatgagaatgaggaggtgtcccgggatttcctgcacggtgccctggagcgagacaagaaggatgggttccagcagacctcagagcatgccctattctcctgctccgtggtggatgttttctcccaactcaaccagagctttgaaatcatcaagaaactcgagtgtcccgaccctcagatcgtggggcactacatgaggcgctttgccaagaccatcagtaatgtgctcctccagtatgcagacatcatctccaaggactttgcctcctactgctccaaggagaaggagaaagtgccctgcattctcatgaataacactcaacagctacgagttcagctggagaagatgttcgaagccatgggaggaaaggagctggatgctgaagccagtgacatcctgaaggagcttcaggtgaaactcaataacgtcttggatgagctcagccgggtgtttgctaccagcttccagccgcacattgaagagtgtgtcaaacagatgggtgacatccttagccaggttaagggcacaggcaatgtgccagccagtgcctgcagcagcgtggcccaggacgcggacaatgtgttgcagcccatcatggacctgctggacagcaacctgaccctctttgccaaaatctgtgagaagactgtgctgaagcgagtgctgaaggagctgtggaagctggttatgaacaccatggagaaaaccatcgtcctgccgcccctcactgaccagacgatgatcgggaacctcttgagaaaacatggcaagggattagaaaagggcagggtgaaattgccaagccactcagacggaacccagatgatcttcaatgcagccaaggagctgggtcagctgtccaaactcaaggatcacatggtacgagaagaagccaagagcttgaccccaaagcagtgcgcggttgttgagttggccctggacaccatcaagcaatatttccacgcgggtggcgtgggcctcaagaagaccttcctggagaagagcccggacctgcaatccttgcgctatgccctgtcgctctacacgcaggccaccgacctgctaatcaagacctttgtacagacgcaatcggcccagggcttgggtgtagaagaccctgtgggtgaagtctctgtccatgttgagctgttcactcatccaggaactggggaacacaaggtcacagtgaaagtggtggctgccaatgacctcaagtggcagacttctggcatcttccggccgttcatcgaggtcaacatcattgggccccagctcagcgacaagaaacgcaagtttgcgaccaaatccaagaacaatagctgggctcccaagtacaatgagagcttccagttcacgctgagcgccgacgcgggtcccgagtgctatgagctgcaggtgtgcgtcaaggactactgcttcgcgcgcgaggaccgcacggtggggctggccgtgctgcagctgcgtgagctggcccagcgcgggagcgccgcctgctggctgccgctcggccgccgcatccacatggacgacacgggcctcacggtgctgcgaatcctctcgcagcgcagcaacgacgaggtggccaaggagttcgtgaagctcaagtcggacacgcgctccgccgaggagggcggtgccgcgcctgcgccttagcgcgggcggtcggccgagcggcactgcgcctgcgcggagggcgctgggcggggagggacggggcttgcgccttggtgggacctccccaggggcggggctcggggggctccacgccaagggtgggctgcgcctacgcccttgactcagctttcccttttggggaattaggaatggaggatgccccgccctctcgggaggccacgcccaagggcgcgacgaaggaaggagccacatccccaacttgaggccacgcccccagcacctagggggcattttgagctgggatgggggaaacctcgtccctatggaggaggccacatcccggggctctggtaccgggaggcaccacctcatgtcccctggaaaagccataagatgggacccagacccctgggaccccagaccaattgccaagtatggaaatctcagctccctcgagggggggccctgggcaaggggtagggctctctggagcgcccctctaggtggcctggggactggagggaccaggatgctggttggagggccccggaataccggagtccctttagatatttgtgcaaaaaataaatggggggaggggggaggatgggatttcaaaagcacatgcgcccttgggcgcccaaaccctgggggccgaggggacggctctggttccccacgctgcccctacttccctttgggagtttgcctctccctctcccccaacaaacccagtcctcatatcatagagttcaacacacccatttgacagatggcaaaactgaggcttaaagagctgcttgagacttggccaaggttccaggtgccataccctctgtgcccctcccttaggcctgtgtgccccatggaagggtgggctgagatcgggatgacctgacacagctccctattgctgctaattccccctcggcctcctccaaggggtgggaattccaggccaagacccctacttcgcctttccttctccggctgccaagcaggacctttgccctcagccctttctcctgggatctccatgggggatgccatgagggcctcccaccacaaaagagaatttgggatcccctggtcccaggtttctccatcccttcttccttttccagaattttccaaataggaaagaacagaaggagaccagaaactctaggggggagaaagagaatgagagaaagagaatgagagagagagaaacacaaacacagtgacacagtgagagcttagtctccaagagcctattcattgattcaaacacccaagccacaggatacctcagatggccctcttgccagctggaagctctttctccaatgagcaaagttacagtgacctggctggagttacctggtgcacataggaccttaggggaaagttcagcgtggactacacttgctctgggatctgcttttccacatgtgtgtatggcacgcctttttctgctggattgggaaggacaagattttgctgtgctagggagaaatgaaaacggggtgagctgagtagctgggtttctggaggatagaacatcagatggggaggctttccgaggtgaagaatgagagggaaccacttactagagagaaaagagctccaggcctggggaacagcacgtgcgaaggccaggagagaagaactgttgaaacaacgagaagggtggcacggctggagctgagccagcaagggggatcgtgaggagccttggggttggggagatctgcagaagcatcagaccaggcagggcctcgtacgcagtcctgaggagttttacttttattctaagacagttggggagctccaggagctgttttaagttggggagagactggattccagcctgcaaaagctgttttgtgaagactaaaaccagtgaggagaggtggaggtgctttggggacactgaaatggattcttggaaagattctgaaggctgtgttgaaaagacacctatagctgtggggacatgactataatcccagcatttggggagaccgaggctggcagatcacttaaggtcaggagtttgagaccagcctggccaacatggcgaaaccccatctctgctaaaaatacaaaaattagctgggtgcagtggtgcatgcctgtagtcccagctactcaggagactgaggcgggagaattgtttgaaccctggaggcagaggttgtagtgagtcgtgatcacacaactgcactccagcctgggcaacagaacaatactccattccctcccctctaccccaccaaaaaaaaaaaaaaatcctgcccttagatgagctctagggctgctgagtacagttgtcccagttgcacagtgcccaagggtttggcattgctaagaaggccacgtgcaaatcctagatattgagtgttgtatgtttgtgacgttggtttcccgacatgtgaatggcccaagtgtctggaagaagtggcgccactttctaatttgcttggagatgttgcatgtcccttaaattcagacaggtgcaggtaactggaggttctgaaccaaaggttaaaatgcaaattctcatacagggttgggaagttgtagccagggataagcttatgtgactgttatatggactgaggagcagatgtgaatttcgaaccatgacatggctgagggtaggggtcgggtggatggatgattcagggttgtaacccatagagcccaaaggggaagtgatctgtgacctggggtgagggtgatctggaagatttttggatggctggaaagaaatggggaagtcgagctgcctgagagagccaagttatttcccaaaagattccttaggagtctttctgttcaagacctccgtgtgtgtgtgtgtgtgtttagggttccccagcaatggcccaggcatgtgaaggaaacaagcttcttcagggaatatttgttgaatgagttttcctgactcccaggctagaactgtttttgcaatttccaccctcttttctttcccccagagaactcctattcgtccttcaaaacccatcacggaaacccctcttggagaaaaccctccttccttcccctcaggactttcccagccaccgtctctcctccagtccagcctgatgccatgggactgggggtttctctgtccagctctgtttctcccagactggggtctgaggactctcaggacccccaactttacctagcacaggctgggcacaagtgggtgacagggagtctacgcctagtggaattatgtattggggcagggtcagtgtgagaatacacatccgcatgcatgtctgtccatgtctgtccgtaccaaccttccccttccacacggacctgggcacataggaggtgtctgagcctgacacatgggacagagagtggacatggctgagacacggacagagaaaagacaaggagtccagggggctgaaagccttttgaaatcaggaagttcctgtattggcagaacaaagcccagagaggagcagggctttcctcaacgccacccagcaagtggacacagagcccggccttggatgacacctccagggttctgaaccctggacctcgctttatgcaaggagctggccccacatttccatgaatcggggaaacagcacaagaaggttggcctgtggcagggcaagggttaaaggggtgacattgagggatgcctcagagtcaaagtcccctgaccaagaggaatagagtagaaaacacagagacagagggtgagatcacgccccgatgaggacggagagagacagagatggagagagacatagaggtggaaatatacagagaaagataaatgcagagaccaaggcagggagtgtcgggggaagtaaagagggtgtcctgaagaaagaaggatctgttcactcttaccagtctgtcctcgaatgatttgcataaaatgaggaggtgcctgtccacacccccaattcctctctcaggccccagagcctgagacctcaccatgcccccatcagagatgcaaaaaactaaacacccaactagaaatccttgggacctctctcggctgggatctcagagcctttctgtcccctacccctaccccatgtgctgtcgattttgcagatggggacaacctggggcctcccggaactctgccaccctggggaagttgggggagggccttagtcccggatcacaaccccgtctgctccccagaatcctttcctaagaatcgttgaggaccaaagttgtctttgctgacacgtgttgcttttctctttgccttttattgtttcagagaaaaatcaagttgactgtgtcaagtaacaccccaccccttacccccgtccagccatagtggctctctggagacacaggtcacaggcggagggtcccctgatcatccccaaccacacagccagggggacttgacccctgtccacccctgtctcgtgctccctcagacccccacaaaccggccaagcagtccggggaggcttcccctccacacaactcttagcatgtgattgcagatgtgaaatcaaaacgttgtttgttttttgttttgttttgattctaccccgtcggtccagtgtctgcacagacgccttcatttctctgtaaatatgtgacttggaacaaatgtttaacacaaacgagaagtggtcatgaatgcatggtgttgagatgttttgcactattctgactttttggtctctgtaaaaatattttattaacagcagacattaaaaaaagaaaaaccacacaca

SEQ ID NO: 5058 - RNA, 9973 nt, Homo sapiens
  source 1..9973: mol_type = mRNA
gcccccggtgctgaaccaagatggccggtggcggccgggccccggcgtgagccaagcgcgggctgcagccgggagatgccccagcccagcggccgctgagcccgacccgacagagccggcccggccgcctccggcccacctgcgagctcggagacatgtctctgctttgcgttggagtcaaaaaagccaagtttgatggtgcccaagagaaattcaacacgtacgtgaccctgaaagtgcagaatgtcaagagcacgaccatcgcggtgcggggcagccagcccagctgggagcaggatttcatgttcgagattaaccgtctggatttgggactgacggtggaggtgtggaataagggtctcatctgggacacaatggtgggcactgtgtggatcccactgaggaccatccgccagtccaatgaggagggccctggagagtggctgacgctggactcccaggtcatcatggcagacagtgagatctgtggcaccaaggaccccaccttccaccgcatcctcctggacacgcgctttgagctacccttagacattcctgaagaggaggctcgctactgggccaagaagctggagcagctcaatgctatgcgggaccaggatgaatattcgttccaagatgagcaagacaagcctctgcctgtccccagcaaccagtgctgcaactggaattattttggctggggtgagcagcacaacgatgaccccgacagtgcagtggatgatcgtgacagtgactaccgcagtgaaacgagcaacagcatcccgccgccctattatactacgtcacaacccaacgcctcagtccaccaatattctgttcgcccaccacccctgggctcccgggagtcctacagtgactccatgcacagttacgaggagttctctgagccacaagccctcagccccacgggtagcagccgctatgcctcttccggggagctgagccagggaagctctcagctgagcgaggacttcgaccctgacgagcacagcctgcagggctccgacatggaggatgagcgggaccgggactcctaccactcctgccacagctcggtcagctaccacaaagactcgcctcgctgggaccaggatgaggaagagctggaggaggacctggaggacttcctggaggaggaggagctgcctgaagatgaggaggagctggaggaggaggaggaggaggtgcctgacgatttgggcagctatgcccagcgtgaagacgtagctgtggctgagcccaaagacttcaaacgcatcagcctcccgccagctgccccagggaaggaggacaaggccccagtggcacccaccgaggcccccgacatggccaaggtggcccccaagccagccacgcccgacaaggtgcctgcagctgagcagatccctgaggctgagccacccaaggacgaggagagtttcaggccgagagaggatgaggaaggccaggaggggcaggactccatgtccagggccaaggccaactggctgcgtgccttcaacaaggtgcggatgcagctgcaggaggcccggggagaaggagagatgtctaaatccctatggttcaaaggcggcccagggggcggtctcatcatcatcgacagcatgccagacatccgcaagaggaaacctatcccactcgtgagcgacttgtccctggtccagtccaggaaagcgggcatcacctcggccttggcctccagcacgttgaacaacgaggagctgaaaaaccacgtttacaagaagaccctgcaagccttaatctaccccatctcgtgcacgacgccacacaacttcgaagtgtggacggccaccacgcccacctactgctacgagtgcgaggggctgctgtggggcatcgcgaggcagggcatgcgctgcaccgagtgcggtgtcaagtgccacgagaagtgccaggacctgctcaacgccgactgcctgcagcgggctgcggagaagagctccaagcacggggcggaggaccggacacagaacatcatcatggtgctcaaggaccgcatgaagatccgggagcgcaacaagcccgagatcttcgagctcatccaggagatcttcgcggtgaccaagacggcgcacacgcagcagatgaaggcggtcaagcagagcgtgctggacggcacgtccaagtggtccgccaagatcagcatcaccgtggtctgcgcccagggcttgcaggcaaaggacaagacaggatccagtgacccctatgtcaccgtccaggtcgggaagaccaagaaacggacaaaaaccatctatgggaacctcaacccggtgtgggaggagaatttccactttgaatgtcacaattcctccgaccgcatcaaggtgcgcgtctgggacgaggatgacgacatcaaatcccgcgtgaaacagaggttcaagagggaatctgacgatttcctggggcagacgatcattgaggtgcggacgctcagcggcgagatggacgtgtggtacaacctggacaagcgaactgacaaatctgccgtgtcgggtgccatccggctccacatcagtgtggagatcaaaggcgaggagaaggtggccccgtaccatgtccagtacacctgtctgcatgagaacctgttccacttcgtgaccgacgtgcagaacaatggggtcgtgaagatcccagatgccaagggtgacgatgcctggaaggtttactacgatgagacagcccaggagattgtggacgagtttgccatgcgctacggcgtcgagtccatctaccaagccatgacccactttgcctgcctctcctccaagtatatgtgcccaggggtgcctgccgtcatgagcaccctgctcgccaacatcaatgcctactacgcacacaccaccgcctccaccaacgtgtctgcctccgaccgcttcgccgcctccaactttgggaaagagcgcttcgtgaaactcctggaccagctgcataactccctgcggattgacctctccatgtaccggaataacttcccagccagcagcccggagagactccaggacctcaaatccactgtggaccttctcaccagcatcaccttctttcggatgaaggtacaagaactccagagcccgccccgagccagccaggtggtaaaggactgtgtgaaagcctgccttaattctacctacgagtacatcttcaataactgccatgaactgtacagccgggagtaccagacagacccggccaagaagggggaagttctcccagaggaacaggggcccagcatcaagaacctcgacttctggtccaagctgattaccctcatagtgtccatcattgaggaagacaagaattcctacactccctgcctcaaccagtttccccaggagctgaatgtgggtaaaatcagcgctgaagtgatgtggaatctgtttgcccaagacatgaagtacgccatggaggagcacgacaagcatcgtctatgcaagagtgccgactacatgaacctccacttcaaggtgaaatggctctacaatgagtatgtgacggaacttcccgccttcaaggaccgcgtgcctgagtaccctgcatggtttgaacccttcgtcatccagtggctggatgagaatgaggaggtgtcccgggatttcctgcacggtgccctggagcgagacaagaaggatgggttccagcagacctcagagcatgccctattctcctgctccgtggtggatgttttctcccaactcaaccagagctttgaaatcatcaagaaactcgagtgtcccgaccctcagatcgtggggcactacatgaggcgctttgccaagaccatcagtaatgtgctcctccagtatgcagacatcatctccaaggactttgcctcctactgctccaaggagaaggagaaagtgccctgcattctcatgaataacactcaacagctacgagttcagctggagaagatgttcgaagccatgggaggaaaggagctggatgctgaagccagtgacatcctgaaggagcttcaggtgaaactcaataacgtcttggatgagctcagccgggtgtttgctaccagcttccagccgcacattgaagagtgtgtcaaacagatgggtgacatccttagccaggttaagggcacaggcaatgtgccagccagtgcctgcagcagcgtggcccaggacgcggacaatgtgttgcagcccatcatggacctgctggacagcaacctgaccctctttgccaaaatctgtgagaagactgtgctgaagcgagtgctgaaggagctgtggaagctggttatgaacaccatggagaaaaccatcgtcctgccgcccctcactgaccagacggggaacctcttgagaaaacatggcaagggattagaaaagggcagggtgaaattgccaagccactcagacggaacccagatgatcttcaatgcagccaaggagctgggtcagctgtccaaactcaaggatcacatggtacgagaagaagccaagagcttgaccccaaagcagtgcgcggttgttgagttggccctggacaccatcaagcaatatttccacgcgggtggcgtgggcctcaagaagaccttcctggagaagagcccggacctgcaatccttgcgctatgccctgtcgctctacacgcaggccaccgacctgctaatcaagacctttgtacagacgcaatcggcccagggcttgggtgtagaagaccctgtgggtgaagtctctgtccatgttgagctgttcactcatccaggaactggggaacacaaggtcacagtgaaagtggtggctgccaatgacctcaagtggcagacttctggcatcttccggccgttcatcgaggtcaacatcattgggccccagctcagcgacaagaaacgcaagtttgcgaccaaatccaagaacaatagctgggctcccaagtacaatgagagcttccagttcacgctgagcgccgacgcgggtcccgagtgctatgagctgcaggtgtgcgtcaaggactactgcttcgcgcgcgaggaccgcacggtggggctggccgtgctgcagctgcgtgagctggcccagcgcgggagcgccgcctgctggctgccgctcggccgccgcatccacatggacgacacgggcctcacggtgctgcgaatcctctcgcagcgcagcaacgacgaggtggccaaggagttcgtgaagctcaagtcggacacgcgctccgccgaggagggcggtgccgcgcctgcgccttagcgcgggcggtcggccgagcggcactgcgcctgcgcggagggcgctgggcggggagggacggggcttgcgccttggtgggacctccccaggggcggggctcggggggctccacgccaagggtgggctgcgcctacgcccttgactcagctttcccttttggggaattaggaatggaggatgccccgccctctcgggaggccacgcccaagggcgcgacgaaggaaggagccacatccccaacttgaggccacgcccccagcacctagggggcattttgagctgggatgggggaaacctcgtccctatggaggaggccacatcccggggctctggtaccgggaggcaccacctcatgtcccctggaaaagccataagatgggacccagacccctgggaccccagaccaattgccaagtatggaaatctcagctccctcgagggggggccctgggcaaggggtagggctctctggagcgcccctctaggtggcctggggactggagggaccaggatgctggttggagggccccggaataccggagtccctttagatatttgtgcaaaaaataaatggggggaggggggaggatgggatttcaaaagcacatgcgcccttgggcgcccaaaccctgggggccgaggggacggctctggttccccacgctgcccctacttccctttgggagtttgcctctccctctcccccaacaaacccagtcctcatatcatagagttcaacacacccatttgacagatggcaaaactgaggcttaaagagctgcttgagacttggccaaggttccaggtgccataccctctgtgcccctcccttaggcctgtgtgccccatggaagggtgggctgagatcgggatgacctgacacagctccctattgctgctaattccccctcggcctcctccaaggggtgggaattccaggccaagacccctacttcgcctttccttctccggctgccaagcaggacctttgccctcagccctttctcctgggatctccatgggggatgccatgagggcctcccaccacaaaagagaatttgggatcccctggtcccaggtttctccatcccttcttccttttccagaattttccaaataggaaagaacagaaggagaccagaaactctaggggggagaaagagaatgagagaaagagaatgagagagagagaaacacaaacacagtgacacagtgagagcttagtctccaagagcctattcattgattcaaacacccaagccacaggatacctcagatggccctcttgccagctggaagctctttctccaatgagcaaagttacagtgacctggctggagttacctggtgcacataggaccttaggggaaagttcagcgtggactacacttgctctgggatctgcttttccacatgtgtgtatggcacgcctttttctgctggattgggaaggacaagattttgctgtgctagggagaaatgaaaacggggtgagctgagtagctgggtttctggaggatagaacatcagatggggaggctttccgaggtgaagaatgagagggaaccacttactagagagaaaagagctccaggcctggggaacagcacgtgcgaaggccaggagagaagaactgttgaaacaacgagaagggtggcacggctggagctgagccagcaagggggatcgtgaggagccttggggttggggagatctgcagaagcatcagaccaggcagggcctcgtacgcagtcctgaggagttttacttttattctaagacagttggggagctccaggagctgttttaagttggggagagactggattccagcctgcaaaagctgttttgtgaagactaaaaccagtgaggagaggtggaggtgctttggggacactgaaatggattcttggaaagattctgaaggctgtgttgaaaagacacctatagctgtggggacatgactataatcccagcatttggggagaccgaggctggcagatcacttaaggtcaggagtttgagaccagcctggccaacatggcgaaaccccatctctgctaaaaatacaaaaattagctgggtgcagtggtgcatgcctgtagtcccagctactcaggagactgaggcgggagaattgtttgaaccctggaggcagaggttgtagtgagtcgtgatcacacaactgcactccagcctgggcaacagaacaatactccattccctcccctctaccccaccaaaaaaaaaaaaaaatcctgcccttagatgagctctagggctgctgagtacagttgtcccagttgcacagtgcccaagggtttggcattgctaagaaggccacgtgcaaatcctagatattgagtgttgtatgtttgtgacgttggtttcccgacatgtgaatggcccaagtgtctggaagaagtggcgccactttctaatttgcttggagatgttgcatgtcccttaaattcagacaggtgcaggtaactggaggttctgaaccaaaggttaaaatgcaaattctcatacagggttgggaagttgtagccagggataagcttatgtgactgttatatggactgaggagcagatgtgaatttcgaaccatgacatggctgagggtaggggtcgggtggatggatgattcagggttgtaacccatagagcccaaaggggaagtgatctgtgacctggggtgagggtgatctggaagatttttggatggctggaaagaaatggggaagtcgagctgcctgagagagccaagttatttcccaaaagattccttaggagtctttctgttcaagacctccgtgtgtgtgtgtgtgtgtttagggttccccagcaatggcccaggcatgtgaaggaaacaagcttcttcagggaatatttgttgaatgagttttcctgactcccaggctagaactgtttttgcaatttccaccctcttttctttcccccagagaactcctattcgtccttcaaaacccatcacggaaacccctcttggagaaaaccctccttccttcccctcaggactttcccagccaccgtctctcctccagtccagcctgatgccatgggactgggggtttctctgtccagctctgtttctcccagactggggtctgaggactctcaggacccccaactttacctagcacaggctgggcacaagtgggtgacagggagtctacgcctagtggaattatgtattggggcagggtcagtgtgagaatacacatccgcatgcatgtctgtccatgtctgtccgtaccaaccttccccttccacacggacctgggcacataggaggtgtctgagcctgacacatgggacagagagtggacatggctgagacacggacagagaaaagacaaggagtccagggggctgaaagccttttgaaatcaggaagttcctgtattggcagaacaaagcccagagaggagcagggctttcctcaacgccacccagcaagtggacacagagcccggccttggatgacacctccagggttctgaaccctggacctcgctttatgcaaggagctggccccacatttccatgaatcggggaaacagcacaagaaggttggcctgtggcagggcaagggttaaaggggtgacattgagggatgcctcagagtcaaagtcccctgaccaagaggaatagagtagaaaacacagagacagagggtgagatcacgccccgatgaggacggagagagacagagatggagagagacatagaggtggaaatatacagagaaagataaatgcagagaccaaggcagggagtgtcgggggaagtaaagagggtgtcctgaagaaagaaggatctgttcactcttaccagtctgtcctcgaatgatttgcataaaatgaggaggtgcctgtccacacccccaattcctctctcaggccccagagcctgagacctcaccatgcccccatcagagatgcaaaaaactaaacacccaactagaaatccttgggacctctctcggctgggatctcagagcctttctgtcccctacccctaccccatgtgctgtcgattttgcagatggggacaacctggggcctcccggaactctgccaccctggggaagttgggggagggccttagtcccggatcacaaccccgtctgctccccagaatcctttcctaagaatcgttgaggaccaaagttgtctttgctgacacgtgttgcttttctctttgccttttattgtttcagagaaaaatcaagttgactgtgtcaagtaacaccccaccccttacccccgtccagccatagtggctctctggagacacaggtcacaggcggagggtcccctgatcatccccaaccacacagccagggggacttgacccctgtccacccctgtctcgtgctccctcagacccccacaaaccggccaagcagtccggggaggcttcccctccacacaactcttagcatgtgattgcagatgtgaaatcaaaacgttgtttgttttttgttttgttttgattctaccccgtcggtccagtgtctgcacagacgccttcatttctctgtaaatatgtgacttggaacaaatgtttaacacaaacgagaagtggtcatgaatgcatggtgttgagatgttttgcactattctgactttttggtctctgtaaaaatattttattaacagcagacattaaaaaaagaaaaaccacacaca

SEQ ID NO: 5059 - RNA, 9970 nt, Homo sapiens
  source 1..9970: mol_type = mRNA
gcccccggtgctgaaccaagatggccggtggcggccgggccccggcgtgagccaagcgcgggctgcagccgggagatgccccagcccagcggccgctgagcccgacccgacagagccggcccggccgcctccggcccacctgcgagctcggagacatgtctctgctttgcgttggagtcaaaaaagccaagtttgatggtgcccaagagaaattcaacacgtacgtgaccctgaaagtgcagaatgtcaagagcacgaccatcgcggtgcggggcagccagcccagctgggagcaggatttcatgttcgagattaaccgtctggatttgggactgacggtggaggtgtggaataagggtctcatctgggacacaatggtgggcactgtgtggatcccactgaggaccatccgccagtccaatgaggagggccctggagagtggctgacgctggactcccaggtcatcatggcagacagtgagatctgtggcaccaaggaccccaccttccaccgcatcctcctggacacgcgctttgagctacccttagacattcctgaagaggaggctcgctactgggccaagaagctggagcagctcaatgctatgcgggaccaggatgaatattcgttccaagatgagcaagacaagcctctgcctgtccccagcaaccagtgctgcaactggaattattttggctggggtgagcagcacaacgatgaccccgacagtgcagtggatgatcgtgacagtgactaccgcagtgaaacgagcaacagcatcccgccgccctattatactacgtcacaacccaacgcctcagtccaccaatattctgttcgcccaccacccctgggctcccgggagtcctacagtgactccatgcacagttacgaggagttctctgagccacaagccctcagccccacgggtagcagccgctatgcctcttccggggagctgagccagggaagctctcagctgagcgaggacttcgaccctgacgagcacagcctgcagggctccgacatggaggatgagcgggaccgggactcctaccactcctgccacagctcggtcagctaccacaaagactcgcctcgctgggaccaggatgaggaagagctggaggaggacctggaggacttcctggaggaggaggagctgcctgaagatgaggaggagctggaggaggaggaggaggaggtgcctgacgatttgggcagctatgcccagcgtgaagacgtagctgtggctgagcccaaagacttcaaacgcatcagcctcccgccagctgccccagggaaggaggacaaggccccagtggcacccaccgaggcccccgacatggccaaggtggcccccaagccagccacgcccgacaaggtgcctgcagctgagcagatccctgaggctgagccacccaaggacgaggagagtttcaggccgagagaggatgaggaaggccaggaggggcaggactccatgtccagggccaaggccaactggctgcgtgccttcaacaaggtgcggatgcagctgcaggaggcccggggagaaggagagatgtctaaatccctatggttcaaaggcggcccagggggcggtctcatcatcatcgacagcatgccagacatccgcaagaggaaacctatcccactcgtgagcgacttgtccctggtccagtccaggaaagcgggcatcacctcggccttggcctccagcacgttgaacaacgaggagctgaaaaaccacgtttacaagaagaccctgcaagccttaatctaccccatctcgtgcacgacgccacacaacttcgaagtgtggacggccaccacgcccacctactgctacgagtgcgaggggctgctgtggggcatcgcgaggcagggcatgcgctgcaccgagtgcggtgtcaagtgccacgagaagtgccaggacctgctcaacgccgactgcctgcagcgggctgcggagaagagctccaagcacggggcggaggaccggacacagaacatcatcatggtgctcaaggaccgcatgaagatccgggagcgcaacaagcccgagatcttcgagctcatccaggagatcttcgcggtgaccaagacggcgcacacgcagcagatgaaggcggtcaagcagagcgtgctggacggcacgtccaagtggtccgccaagatcagcatcaccgtggtctgcgcccagggcttgcaggcaaaggacaagacaggatccagtgacccctatgtcaccgtccaggtcgggaagaccaagaaacggacaaaaaccatctatgggaacctcaacccggtgtgggaggagaatttccactttgaatgtcacaattcctccgaccgcatcaaggtgcgcgtctgggacgaggatgacgacatcaaatcccgcgtgaaacagaggttcaagagggaatctgacgatttcctggggcagacgatcattgaggtgcggacgctcagcggcgagatggacgtgtggtacaacctggacaagcgaactgacaaatctgccgtgtcgggtgccatccggctccacatcagtgtggagatcaaaggcgaggagaaggtggccccgtaccatgtccagtacacctgtctgcatgagaacctgttccacttcgtgaccgacgtgcagaacaatggggtcgtgaagatcccagatgccaagggtgacgatgcctggaaggtttactacgatgagacagcccaggagattgtggacgagtttgccatgcgctacggcgtcgagtccatctaccaagccatgacccactttgcctgcctctcctccaagtatatgtgcccaggggtgcctgccgtcatgagcaccctgctcgccaacatcaatgcctactacgcacacaccaccgcctccaccaacgtgtctgcctccgaccgcttcgccgcctccaactttgggaaagagcgcttcgtgaaactcctggaccagctgcataactccctgcggattgacctctccatgtaccggaataacttcccagccagcagcccggagagactccaggacctcaaatccactgtggaccttctcaccagcatcaccttctttcggatgaaggtacaagaactccagagcccgccccgagccagccaggtggtaaaggactgtgtgaaagcctgccttaattctacctacgagtacatcttcaataactgccatgaactgtacagccgggagtaccagacagacccggccaagaagggggaagttctcccagaggaacaggggcccagcatcaagaacctcgacttctggtccaagctgattaccctcatagtgtccatcattgaggaagacaagaattcctacactccctgcctcaaccagtttccccaggagctgaatgtgggtaaaatcagcgctgaagtgatgtggaatctgtttgcccaagacatgaagtacgccatggaggagcacgacaagcatcgtctatgcaagagtgccgactacatgaacctccacttcaaggtgaaatggctctacaatgagtatgtgacggaacttcccgccttcaaggaccgcgtgcctgagtaccctgcatggtttgaacccttcgtcatccagtggctggatgagaatgaggaggtgtcccgggatttcctgcacggtgccctggagcgagacaagaaggatgggttccagcagacctcagagcatgccctattctcctgctccgtggtggatgttttctcccaactcaaccagagctttgaaatcatcaagaaactcgagtgtcccgaccctcagatcgtggggcactacatgaggcgctttgccaagaccatcagtaatgtgctcctccagtatgcagacatcatctccaaggactttgcctcctactgctccaaggagaaggagaaaccctgcattctcatgaataacactcaacagctacgagttcagctggagaagatgttcgaagccatgggaggaaaggagctggatgctgaagccagtgacatcctgaaggagcttcaggtgaaactcaataacgtcttggatgagctcagccgggtgtttgctaccagcttccagccgcacattgaagagtgtgtcaaacagatgggtgacatccttagccaggttaagggcacaggcaatgtgccagccagtgcctgcagcagcgtggcccaggacgcggacaatgtgttgcagcccatcatggacctgctggacagcaacctgaccctctttgccaaaatctgtgagaagactgtgctgaagcgagtgctgaaggagctgtggaagctggttatgaacaccatggagaaaaccatcgtcctgccgcccctcactgaccagacggggaacctcttgagaaaacatggcaagggattagaaaagggcagggtgaaattgccaagccactcagacggaacccagatgatcttcaatgcagccaaggagctgggtcagctgtccaaactcaaggatcacatggtacgagaagaagccaagagcttgaccccaaagcagtgcgcggttgttgagttggccctggacaccatcaagcaatatttccacgcgggtggcgtgggcctcaagaagaccttcctggagaagagcccggacctgcaatccttgcgctatgccctgtcgctctacacgcaggccaccgacctgctaatcaagacctttgtacagacgcaatcggcccagggcttgggtgtagaagaccctgtgggtgaagtctctgtccatgttgagctgttcactcatccaggaactggggaacacaaggtcacagtgaaagtggtggctgccaatgacctcaagtggcagacttctggcatcttccggccgttcatcgaggtcaacatcattgggccccagctcagcgacaagaaacgcaagtttgcgaccaaatccaagaacaatagctgggctcccaagtacaatgagagcttccagttcacgctgagcgccgacgcgggtcccgagtgctatgagctgcaggtgtgcgtcaaggactactgcttcgcgcgcgaggaccgcacggtggggctggccgtgctgcagctgcgtgagctggcccagcgcgggagcgccgcctgctggctgccgctcggccgccgcatccacatggacgacacgggcctcacggtgctgcgaatcctctcgcagcgcagcaacgacgaggtggccaaggagttcgtgaagctcaagtcggacacgcgctccgccgaggagggcggtgccgcgcctgcgccttagcgcgggcggtcggccgagcggcactgcgcctgcgcggagggcgctgggcggggagggacggggcttgcgccttggtgggacctccccaggggcggggctcggggggctccacgccaagggtgggctgcgcctacgcccttgactcagctttcccttttggggaattaggaatggaggatgccccgccctctcgggaggccacgcccaagggcgcgacgaaggaaggagccacatccccaacttgaggccacgcccccagcacctagggggcattttgagctgggatgggggaaacctcgtccctatggaggaggccacatcccggggctctggtaccgggaggcaccacctcatgtcccctggaaaagccataagatgggacccagacccctgggaccccagaccaattgccaagtatggaaatctcagctccctcgagggggggccctgggcaaggggtagggctctctggagcgcccctctaggtggcctggggactggagggaccaggatgctggttggagggccccggaataccggagtccctttagatatttgtgcaaaaaataaatggggggaggggggaggatgggatttcaaaagcacatgcgcccttgggcgcccaaaccctgggggccgaggggacggctctggttccccacgctgcccctacttccctttgggagtttgcctctccctctcccccaacaaacccagtcctcatatcatagagttcaacacacccatttgacagatggcaaaactgaggcttaaagagctgcttgagacttggccaaggttccaggtgccataccctctgtgcccctcccttaggcctgtgtgccccatggaagggtgggctgagatcgggatgacctgacacagctccctattgctgctaattccccctcggcctcctccaaggggtgggaattccaggccaagacccctacttcgcctttccttctccggctgccaagcaggacctttgccctcagccctttctcctgggatctccatgggggatgccatgagggcctcccaccacaaaagagaatttgggatcccctggtcccaggtttctccatcccttcttccttttccagaattttccaaataggaaagaacagaaggagaccagaaactctaggggggagaaagagaatgagagaaagagaatgagagagagagaaacacaaacacagtgacacagtgagagcttagtctccaagagcctattcattgattcaaacacccaagccacaggatacctcagatggccctcttgccagctggaagctctttctccaatgagcaaagttacagtgacctggctggagttacctggtgcacataggaccttaggggaaagttcagcgtggactacacttgctctgggatctgcttttccacatgtgtgtatggcacgcctttttctgctggattgggaaggacaagattttgctgtgctagggagaaatgaaaacggggtgagctgagtagctgggtttctggaggatagaacatcagatggggaggctttccgaggtgaagaatgagagggaaccacttactagagagaaaagagctccaggcctggggaacagcacgtgcgaaggccaggagagaagaactgttgaaacaacgagaagggtggcacggctggagctgagccagcaagggggatcgtgaggagccttggggttggggagatctgcagaagcatcagaccaggcagggcctcgtacgcagtcctgaggagttttacttttattctaagacagttggggagctccaggagctgttttaagttggggagagactggattccagcctgcaaaagctgttttgtgaagactaaaaccagtgaggagaggtggaggtgctttggggacactgaaatggattcttggaaagattctgaaggctgtgttgaaaagacacctatagctgtggggacatgactataatcccagcatttggggagaccgaggctggcagatcacttaaggtcaggagtttgagaccagcctggccaacatggcgaaaccccatctctgctaaaaatacaaaaattagctgggtgcagtggtgcatgcctgtagtcccagctactcaggagactgaggcgggagaattgtttgaaccctggaggcagaggttgtagtgagtcgtgatcacacaactgcactccagcctgggcaacagaacaatactccattccctcccctctaccccaccaaaaaaaaaaaaaaatcctgcccttagatgagctctagggctgctgagtacagttgtcccagttgcacagtgcccaagggtttggcattgctaagaaggccacgtgcaaatcctagatattgagtgttgtatgtttgtgacgttggtttcccgacatgtgaatggcccaagtgtctggaagaagtggcgccactttctaatttgcttggagatgttgcatgtcccttaaattcagacaggtgcaggtaactggaggttctgaaccaaaggttaaaatgcaaattctcatacagggttgggaagttgtagccagggataagcttatgtgactgttatatggactgaggagcagatgtgaatttcgaaccatgacatggctgagggtaggggtcgggtggatggatgattcagggttgtaacccatagagcccaaaggggaagtgatctgtgacctggggtgagggtgatctggaagatttttggatggctggaaagaaatggggaagtcgagctgcctgagagagccaagttatttcccaaaagattccttaggagtctttctgttcaagacctccgtgtgtgtgtgtgtgtgtttagggttccccagcaatggcccaggcatgtgaaggaaacaagcttcttcagggaatatttgttgaatgagttttcctgactcccaggctagaactgtttttgcaatttccaccctcttttctttcccccagagaactcctattcgtccttcaaaacccatcacggaaacccctcttggagaaaaccctccttccttcccctcaggactttcccagccaccgtctctcctccagtccagcctgatgccatgggactgggggtttctctgtccagctctgtttctcccagactggggtctgaggactctcaggacccccaactttacctagcacaggctgggcacaagtgggtgacagggagtctacgcctagtggaattatgtattggggcagggtcagtgtgagaatacacatccgcatgcatgtctgtccatgtctgtccgtaccaaccttccccttccacacggacctgggcacataggaggtgtctgagcctgacacatgggacagagagtggacatggctgagacacggacagagaaaagacaaggagtccagggggctgaaagccttttgaaatcaggaagttcctgtattggcagaacaaagcccagagaggagcagggctttcctcaacgccacccagcaagtggacacagagcccggccttggatgacacctccagggttctgaaccctggacctcgctttatgcaaggagctggccccacatttccatgaatcggggaaacagcacaagaaggttggcctgtggcagggcaagggttaaaggggtgacattgagggatgcctcagagtcaaagtcccctgaccaagaggaatagagtagaaaacacagagacagagggtgagatcacgccccgatgaggacggagagagacagagatggagagagacatagaggtggaaatatacagagaaagataaatgcagagaccaaggcagggagtgtcgggggaagtaaagagggtgtcctgaagaaagaaggatctgttcactcttaccagtctgtcctcgaatgatttgcataaaatgaggaggtgcctgtccacacccccaattcctctctcaggccccagagcctgagacctcaccatgcccccatcagagatgcaaaaaactaaacacccaactagaaatccttgggacctctctcggctgggatctcagagcctttctgtcccctacccctaccccatgtgctgtcgattttgcagatggggacaacctggggcctcccggaactctgccaccctggggaagttgggggagggccttagtcccggatcacaaccccgtctgctccccagaatcctttcctaagaatcgttgaggaccaaagttgtctttgctgacacgtgttgcttttctctttgccttttattgtttcagagaaaaatcaagttgactgtgtcaagtaacaccccaccccttacccccgtccagccatagtggctctctggagacacaggtcacaggcggagggtcccctgatcatccccaaccacacagccagggggacttgacccctgtccacccctgtctcgtgctccctcagacccccacaaaccggccaagcagtccggggaggcttcccctccacacaactcttagcatgtgattgcagatgtgaaatcaaaacgttgtttgttttttgttttgttttgattctaccccgtcggtccagtgtctgcacagacgccttcatttctctgtaaatatgtgacttggaacaaatgtttaacacaaacgagaagtggtcatgaatgcatggtgttgagatgttttgcactattctgactttttggtctctgtaaaaatattttattaacagcagacattaaaaaaagaaaaaccacacaca

SEQ ID NO: 5060 - RNA, 9904 nt, Homo sapiens
  source 1..9904: mol_type = mRNA
gcccccggtgctgaaccaagatggccggtggcggccgggccccggcgtgagccaagcgcgggctgcagccgggagatgccccagcccagcggccgctgagcccgacccgacagagccggcccggccgcctccggcccacctgcgagctcggagacatgtctctgctttgcgttggagtcaaaaaagccaagtttgatggtgcccaagagaaattcaacacgtacgtgaccctgaaagtgcagaatgtcaagagcacgaccatcgcggtgcggggcagccagcccagctgggagcaggatttcatgttcgagattaaccgtctggatttgggactgacggtggaggtgtggaataagggtctcatctgggacacaatggtgggcactgtgtggatcccactgaggaccatccgccagtccaatgaggagggccctggagagtggctgacgctggactcccaggtcatcatggcagacagtgagatctgtggcaccaaggaccccaccttccaccgcatcctcctggacacgcgctttgagctacccttagacattcctgaagaggaggctcgctactgggccaagaagctggagcagctcaatgctatgcgggaccaggatgaatattcgttccaagatgagcaagacaagcctctgcctgtccccagcaaccagtgctgcaactggaattattttggctggggtgagcagcacaacgatgaccccgacagtgcagtggatgatcgtgacagtgactaccgcagtgaaacgagcaacagcatcccgccgccctattatactacgtcacaacccaacgcctcagtccaccaatattctgttcgcccaccacccctgggctcccgggagtcctacagtgactccatgcacagttacgaggagttctctgagccacaagccctcagccccacgggtagcagccgctatgcctcttccggggagctgagccagggaagctctcagctgagcgaggacttcgaccctgacgagcacagcctgcagggctccgacatggaggatgagcgggaccgggactcctaccactcctgccacagctcggtcagctaccacaaagactcgcctcgctgggaccaggatgaggaagagctggaggaggacctggaggacttcctggaggaggaggagctgcctgaagatgaggaggagctggaggaggaggaggaggaggtgcctgacgatttgggcagctatgcccagcgtgaagacgtagctgtggctgagcccaaagacttcaaacgcatcagcctcccgccagctgccccagggaaggaggacaaggccccagtggcacccaccgaggcccccgacatggccaaggtggcccccaagccagccacgcccgacaaggtgcctgcagctgagcagatccctgaggctgagccacccaaggacgaggagagtttcaggccgagagaggatgaggaaggccaggaggggcaggactccatgtccagggccaaggccaactggctgcgtgccttcaacaaggtgcggatgcagctgcaggaggcccggggagaaggagagatgtctaaatccctatggttcaaaggcggcccagggggcggtctcatcatcatcgacagcatgccagacatccgcaagaggaaacctatcccactcgtgagcgacttgtccctggtccagtccaggaaagcgggcatcacctcggccttggcctccagcacgttgaacaacgaggagctgaaaaaccacgtttacaagaagaccctgcaagccttaatctaccccatctcgtgcacgacgccacacaacttcgaagtgtggacggccaccacgcccacctactgctacgagtgcgaggggctgctgtggggcatcgcgaggcagggcatgcgctgcaccgagtgcggtgtcaagtgccacgagaagtgccaggacctgctcaacgccgactgcctgcagcgggctgcggagaagagctccaagcacggggcggaggaccggacacagaacatcatcatggtgctcaaggaccgcatgaagatccgggagcgcaacaagcccgagatcttcgagctcatccaggagatcttcgcggtgaccaagacggcgcacacgcagcagatgaaggcggtcaagcagagcgtgctggacggcacgtccaagtggtccgccaagatcagcatcaccgtggtctgcgcccagggcttgcaggcaaaggacaagacaggatccagtgacccctatgtcaccgtccaggtcgggaagaccaagaaacggacaaaaaccatctatgggaacctcaacccggtgtgggaggagaatttccactttgaatgtcacaattcctccgaccgcatcaaggtgcgcgtctgggacgaggatgacgacatcaaatcccgcgtgaaacagaggttcaagagggaatctgacgatttcctggggcagacgatcattgaggtgcggacgctcagcggcgagatggacgtgtggtacaacctggacaagcgaactgacaaatctgccgtgtcgggtgccatccggctccacatcagtgtggagatcaaaggcgaggagaaggtggccccgtaccatgtccagtacacctgtctgcatgagaacctgttccacttcgtgaccgacgtgcagaacaatggggtcgtgaagatcccagatgccaagggtgacgatgcctggaaggtttactacgatgagacagcccaggagattgtggacgagtttgccatgcgctacggcgtcgagtccatctaccaagccatgacccactttgcctgcctctcctccaagtatatgtgcccaggggtgcctgccgtcatgagcaccctgctcgccaacatcaatgcctactacgcacacaccaccgcctccaccaacgtgtctgcctccgaccgcttcgccgcctccaactttgggaaagagcgcttcgtgaaactcctggaccagctgcataactccctgcggattgacctctccatgtaccggaataacttcccagccagcagcccggagagactccaggacctcaaatccactgtggaccttctcaccagcatcaccttctttcggatgaaggtacaagaactccagagcccgccccgagccagccaggtggtaaaggactgtgtgaaagcctgccttaattctacctacgagtacatcttcaataactgccatgaactgtacagccgggagtaccagacagacccggccaagaagggggaagttctcccagaggaacaggggcccagcatcaagaacctcgacttctggtccaagctgattaccctcatagtgtccatcattgaggaagacaagaattcctacactccctgcctcaaccagtttccccaggagctgaatgtgggtaaaatcagcgctgaagtgatgtggaatctgtttgcccaagacatgaagtacgccatggaggagcacgacaagcatcgtctatgcaagagtgccgactacatgaacctccacttcaaggtgaaatggctctacaatgagtatgtgacggaacttcccgccttcaaggaccgcgtgcctgagtaccctgcatggtttgaacccttcgtcatccagtggctggatgagaatgaggaggtgtcccgggatttcctgcacggtgccctggagcgagacaagaaggatgggttccagcagacctcagagcatgccctattctcctgctccgtggtggatgttttctcccaactcaaccagagctttgaaatcatcaagaaactcgagtgtcccgaccctcagatcgtggggcactacatgaggcgctttgccaagaccatcagtaatgtgctcctccagtatgcagacatcatctccaaggactttgcctcctactgctccaaggagaaggagaaagtgccctgcattctcatgaataacactcaacagctacgagttcagctggagaagatgttcgaagccatgggaggaaaggagctggatgctgaagccagtgacatcctgaaggagcttcaggtgaaactcaataacgtcttggatgagctcagccgggtgtttgctaccagcttccagccgcacattgaagagtgtgtcaaacagatgggtgacatccttagccaggttaagggcacaggcaatgtgccagccagtgcctgcagcagcgtggcccaggacgcggacaatgtgttgcagcccatcatggacctgctggacagcaacctgaccctctttgccaaaatctgtgagaagactgtgctgaagcgagtgctgaaggagctgtggaagctggttatgaacaccatggagaaaaccatcgtcctgccgcccctcactgaccagacgggaacccagatgatcttcaatgcagccaaggagctgggtcagctgtccaaactcaaggatcacatggtacgagaagaagccaagagcttgaccccaaagcagtgcgcggttgttgagttggccctggacaccatcaagcaatatttccacgcgggtggcgtgggcctcaagaagaccttcctggagaagagcccggacctgcaatccttgcgctatgccctgtcgctctacacgcaggccaccgacctgctaatcaagacctttgtacagacgcaatcggcccagggcttgggtgtagaagaccctgtgggtgaagtctctgtccatgttgagctgttcactcatccaggaactggggaacacaaggtcacagtgaaagtggtggctgccaatgacctcaagtggcagacttctggcatcttccggccgttcatcgaggtcaacatcattgggccccagctcagcgacaagaaacgcaagtttgcgaccaaatccaagaacaatagctgggctcccaagtacaatgagagcttccagttcacgctgagcgccgacgcgggtcccgagtgctatgagctgcaggtgtgcgtcaaggactactgcttcgcgcgcgaggaccgcacggtggggctggccgtgctgcagctgcgtgagctggcccagcgcgggagcgccgcctgctggctgccgctcggccgccgcatccacatggacgacacgggcctcacggtgctgcgaatcctctcgcagcgcagcaacgacgaggtggccaaggagttcgtgaagctcaagtcggacacgcgctccgccgaggagggcggtgccgcgcctgcgccttagcgcgggcggtcggccgagcggcactgcgcctgcgcggagggcgctgggcggggagggacggggcttgcgccttggtgggacctccccaggggcggggctcggggggctccacgccaagggtgggctgcgcctacgcccttgactcagctttcccttttggggaattaggaatggaggatgccccgccctctcgggaggccacgcccaagggcgcgacgaaggaaggagccacatccccaacttgaggccacgcccccagcacctagggggcattttgagctgggatgggggaaacctcgtccctatggaggaggccacatcccggggctctggtaccgggaggcaccacctcatgtcccctggaaaagccataagatgggacccagacccctgggaccccagaccaattgccaagtatggaaatctcagctccctcgagggggggccctgggcaaggggtagggctctctggagcgcccctctaggtggcctggggactggagggaccaggatgctggttggagggccccggaataccggagtccctttagatatttgtgcaaaaaataaatggggggaggggggaggatgggatttcaaaagcacatgcgcccttgggcgcccaaaccctgggggccgaggggacggctctggttccccacgctgcccctacttccctttgggagtttgcctctccctctcccccaacaaacccagtcctcatatcatagagttcaacacacccatttgacagatggcaaaactgaggcttaaagagctgcttgagacttggccaaggttccaggtgccataccctctgtgcccctcccttaggcctgtgtgccccatggaagggtgggctgagatcgggatgacctgacacagctccctattgctgctaattccccctcggcctcctccaaggggtgggaattccaggccaagacccctacttcgcctttccttctccggctgccaagcaggacctttgccctcagccctttctcctgggatctccatgggggatgccatgagggcctcccaccacaaaagagaatttgggatcccctggtcccaggtttctccatcccttcttccttttccagaattttccaaataggaaagaacagaaggagaccagaaactctaggggggagaaagagaatgagagaaagagaatgagagagagagaaacacaaacacagtgacacagtgagagcttagtctccaagagcctattcattgattcaaacacccaagccacaggatacctcagatggccctcttgccagctggaagctctttctccaatgagcaaagttacagtgacctggctggagttacctggtgcacataggaccttaggggaaagttcagcgtggactacacttgctctgggatctgcttttccacatgtgtgtatggcacgcctttttctgctggattgggaaggacaagattttgctgtgctagggagaaatgaaaacggggtgagctgagtagctgggtttctggaggatagaacatcagatggggaggctttccgaggtgaagaatgagagggaaccacttactagagagaaaagagctccaggcctggggaacagcacgtgcgaaggccaggagagaagaactgttgaaacaacgagaagggtggcacggctggagctgagccagcaagggggatcgtgaggagccttggggttggggagatctgcagaagcatcagaccaggcagggcctcgtacgcagtcctgaggagttttacttttattctaagacagttggggagctccaggagctgttttaagttggggagagactggattccagcctgcaaaagctgttttgtgaagactaaaaccagtgaggagaggtggaggtgctttggggacactgaaatggattcttggaaagattctgaaggctgtgttgaaaagacacctatagctgtggggacatgactataatcccagcatttggggagaccgaggctggcagatcacttaaggtcaggagtttgagaccagcctggccaacatggcgaaaccccatctctgctaaaaatacaaaaattagctgggtgcagtggtgcatgcctgtagtcccagctactcaggagactgaggcgggagaattgtttgaaccctggaggcagaggttgtagtgagtcgtgatcacacaactgcactccagcctgggcaacagaacaatactccattccctcccctctaccccaccaaaaaaaaaaaaaaatcctgcccttagatgagctctagggctgctgagtacagttgtcccagttgcacagtgcccaagggtttggcattgctaagaaggccacgtgcaaatcctagatattgagtgttgtatgtttgtgacgttggtttcccgacatgtgaatggcccaagtgtctggaagaagtggcgccactttctaatttgcttggagatgttgcatgtcccttaaattcagacaggtgcaggtaactggaggttctgaaccaaaggttaaaatgcaaattctcatacagggttgggaagttgtagccagggataagcttatgtgactgttatatggactgaggagcagatgtgaatttcgaaccatgacatggctgagggtaggggtcgggtggatggatgattcagggttgtaacccatagagcccaaaggggaagtgatctgtgacctggggtgagggtgatctggaagatttttggatggctggaaagaaatggggaagtcgagctgcctgagagagccaagttatttcccaaaagattccttaggagtctttctgttcaagacctccgtgtgtgtgtgtgtgtgtttagggttccccagcaatggcccaggcatgtgaaggaaacaagcttcttcagggaatatttgttgaatgagttttcctgactcccaggctagaactgtttttgcaatttccaccctcttttctttcccccagagaactcctattcgtccttcaaaacccatcacggaaacccctcttggagaaaaccctccttccttcccctcaggactttcccagccaccgtctctcctccagtccagcctgatgccatgggactgggggtttctctgtccagctctgtttctcccagactggggtctgaggactctcaggacccccaactttacctagcacaggctgggcacaagtgggtgacagggagtctacgcctagtggaattatgtattggggcagggtcagtgtgagaatacacatccgcatgcatgtctgtccatgtctgtccgtaccaaccttccccttccacacggacctgggcacataggaggtgtctgagcctgacacatgggacagagagtggacatggctgagacacggacagagaaaagacaaggagtccagggggctgaaagccttttgaaatcaggaagttcctgtattggcagaacaaagcccagagaggagcagggctttcctcaacgccacccagcaagtggacacagagcccggccttggatgacacctccagggttctgaaccctggacctcgctttatgcaaggagctggccccacatttccatgaatcggggaaacagcacaagaaggttggcctgtggcagggcaagggttaaaggggtgacattgagggatgcctcagagtcaaagtcccctgaccaagaggaatagagtagaaaacacagagacagagggtgagatcacgccccgatgaggacggagagagacagagatggagagagacatagaggtggaaatatacagagaaagataaatgcagagaccaaggcagggagtgtcgggggaagtaaagagggtgtcctgaagaaagaaggatctgttcactcttaccagtctgtcctcgaatgatttgcataaaatgaggaggtgcctgtccacacccccaattcctctctcaggccccagagcctgagacctcaccatgcccccatcagagatgcaaaaaactaaacacccaactagaaatccttgggacctctctcggctgggatctcagagcctttctgtcccctacccctaccccatgtgctgtcgattttgcagatggggacaacctggggcctcccggaactctgccaccctggggaagttgggggagggccttagtcccggatcacaaccccgtctgctccccagaatcctttcctaagaatcgttgaggaccaaagttgtctttgctgacacgtgttgcttttctctttgccttttattgtttcagagaaaaatcaagttgactgtgtcaagtaacaccccaccccttacccccgtccagccatagtggctctctggagacacaggtcacaggcggagggtcccctgatcatccccaaccacacagccagggggacttgacccctgtccacccctgtctcgtgctccctcagacccccacaaaccggccaagcagtccggggaggcttcccctccacacaactcttagcatgtgattgcagatgtgaaatcaaaacgttgtttgttttttgttttgttttgattctaccccgtcggtccagtgtctgcacagacgccttcatttctctgtaaatatgtgacttggaacaaatgtttaacacaaacgagaagtggtcatgaatgcatggtgttgagatgttttgcactattctgactttttggtctctgtaaaaatattttattaacagcagacattaaaaaaagaaaaaccacacaca

SEQ ID NO: 5061 - RNA, 9953 nt, Homo sapiens
  source 1..9953: mol_type = mRNA
ctgaaccaagatggccggtggcggccgggccccggcgtgagccaagcgcgggctgcagccgggagatgccccagcccagcggccgctgagcccgacccgacagagccggcccggccgcctccggcccacctgcgagctcggagacatgtctctgctttgcgttggagagaaattcaacacgtacgtgaccctgaaagtgcagaatgtcaagagcacgaccatcgcggtgcggggcagccagcccagctgggagcaggatttcatgttcgagattaaccgtctggatttgggactgacggtggaggtgtggaataagggtctcatctgggacacaatggtgggcactgtgtggatcccactgaggaccatccgccagtccaatgaggagggccctggagagtggctgacgctggactcccaggtcatcatggcagacagtgagatctgtggcaccaaggaccccaccttccaccgcatcctcctggacacgcgctttgagctacccttagacattcctgaagaggaggctcgctactgggccaagaagctggagcagctcaatgctatgcgggaccaggatgaatattcgttccaagatgagcaagacaagcctctgcctgtccccagcaaccagtgctgcaactggaattattttggctggggtgagcagcacaacgatgaccccgacagtgcagtggatgatcgtgacagtgactaccgcagtgaaacgagcaacagcatcccgccgccctattatactacgtcacaacccaacgcctcagtccaccaatattctgttcgcccaccacccctgggctcccgggagtcctacagtgactccatgcacagttacgaggagttctctgagccacaagccctcagccccacgggtagcagccgctatgcctcttccggggagctgagccagggaagctctcagctgagcgaggacttcgaccctgacgagcacagcctgcagggctccgacatggaggatgagcgggaccgggactcctaccactcctgccacagctcggtcagctaccacaaagactcgcctcgctgggaccaggatgaggaagagctggaggaggacctggaggacttcctggaggaggaggagctgcctgaagatgaggaggagctggaggaggaggaggaggaggtgcctgacgatttgggcagctatgcccagcgtgaagacgtagctgtggctgagcccaaagacttcaaacgcatcagcctcccgccagctgccccagggaaggaggacaaggccccagtggcacccaccgaggcccccgacatggccaaggtggcccccaagccagccacgcccgacaaggtgcctgcagctgagcagatccctgaggctgagccacccaaggacgaggagagtttcaggccgagagaggatgaggaaggccaggaggggcaggactccatgtccagggccaaggccaactggctgcgtgccttcaacaaggtgcggatgcagctgcaggaggcccggggagaaggagagatgtctaaatccctatggttcaaaggcggcccagggggcggtctcatcatcatcgacagcatgccagacatccgcaagaggaaacctatcccactcgtgagcgacttggccatgtccctggtccagtccaggaaagcgggcatcacctcggccttggcctccagcacgttgaacaacgaggagctgaaaaaccacgtttacaagaagaccctgcaagccttaatctaccccatctcgtgcacgacgccacacaacttcgaagtgtggacggccaccacgcccacctactgctacgagtgcgaggggctgctgtggggcatcgcgaggcagggcatgcgctgcaccgagtgcggtgtcaagtgccacgagaagtgccaggacctgctcaacgccgactgcctgcagcgggctgcggagaagagctccaagcacggggcggaggaccggacacagaacatcatcatggtgctcaaggaccgcatgaagatccgggagcgcaacaagcccgagatcttcgagctcatccaggagatcttcgcggtgaccaagacggcgcacacgcagcagatgaaggcggtcaagcagagcgtgctggacggcacgtccaagtggtccgccaagatcagcatcaccgtggtctgcgcccagggcttgcaggcaaaggacaagacaggatccagtgacccctatgtcaccgtccaggtcgggaagaccaagaaacggacaaaaaccatctatgggaacctcaacccggtgtgggaggagaatttccactttgaatgtcacaattcctccgaccgcatcaaggtgcgcgtctgggacgaggatgacgacatcaaatcccgcgtgaaacagaggttcaagagggaatctgacgatttcctggggcagacgatcattgaggtgcggacgctcagcggcgagatggacgtgtggtacaacctggacaagcgaactgacaaatctgccgtgtcgggtgccatccggctccacatcagtgtggagatcaaaggcgaggagaaggtggccccgtaccatgtccagtacacctgtctgcatgagaacctgttccacttcgtgaccgacgtgcagaacaatggggtcgtgaagatcccagatgccaagggtgacgatgcctggaaggtttactacgatgagacagcccaggagattgtggacgagtttgccatgcgctacggcgtcgagtccatctaccaagccatgacccactttgcctgcctctcctccaagtatatgtgcccaggggtgcctgccgtcatgagcaccctgctcgccaacatcaatgcctactacgcacacaccaccgcctccaccaacgtgtctgcctccgaccgcttcgccgcctccaactttgggaaagagcgcttcgtgaaactcctggaccagctgcataactccctgcggattgacctctccatgtaccggaataacttcccagccagcagcccggagagactccaggacctcaaatccactgtggaccttctcaccagcatcaccttctttcggatgaaggtacaagaactccagagcccgccccgagccagccaggtggtaaaggactgtgtgaaagcctgccttaattctacctacgagtacatcttcaataactgccatgaactgtacagccgggagtaccagacagacccggccaagaagggggaagttctcccagaggaacaggggcccagcatcaagaacctcgacttctggtccaagctgattaccctcatagtgtccatcattgaggaagacaagaattcctacactccctgcctcaaccagtttccccaggagctgaatgtgggtaaaatcagcgctgaagtgatgtggaatctgtttgcccaagacatgaagtacgccatggaggagcacgacaagcatcgtctatgcaagagtgccgactacatgaacctccacttcaaggtgaaatggctctacaatgagtatgtgacggaacttcccgccttcaaggaccgcgtgcctgagtaccctgcatggtttgaacccttcgtcatccagtggctggatgagaatgaggaggtgtcccgggatttcctgcacggtgccctggagcgagacaagaaggatgggttccagcagacctcagagcatgccctattctcctgctccgtggtggatgttttctcccaactcaaccagagctttgaaatcatcaagaaactcgagtgtcccgaccctcagatcgtggggcactacatgaggcgctttgccaagaccatcagtaatgtgctcctccagtatgcagacatcatctccaaggactttgcctcctactgctccaaggagaaggagaaagtgccctgcattctcatgaataacactcaacagctacgagttcagctggagaagatgttcgaagccatgggaggaaaggagctggatgctgaagccagtgacatcctgaaggagcttcaggtgaaactcaataacgtcttggatgagctcagccgggtgtttgctaccagcttccagccgcacattgaagagtgtgtcaaacagatgggtgacatccttagccaggttaagggcacaggcaatgtgccagccagtgcctgcagcagcgtggcccaggacgcggacaatgtgttgcagcccatcatggacctgctggacagcaacctgaccctctttgccaaaatctgtgagaagactgtgctgaagcgagtgctgaaggagctgtggaagctggttatgaacaccatggagaaaaccatcgtcctgccgcccctcactgaccagacgatgatcgggaacctcttgagaaaacatggcaagggattagaaaagggcagggtgaaattgccaagccactcagacggaacccagatgatcttcaatgcagccaaggagctgggtcagctgtccaaactcaaggatcacatggtacgagaagaagccaagagcttgaccccaaagcagtgcgcggttgttgagttggccctggacaccatcaagcaatatttccacgcgggtggcgtgggcctcaagaagaccttcctggagaagagcccggacctgcaatccttgcgctatgccctgtcgctctacacgcaggccaccgacctgctaatcaagacctttgtacagacgcaatcggcccagggcttgggtgtagaagaccctgtgggtgaagtctctgtccatgttgagctgttcactcatccaggaactggggaacacaaggtcacagtgaaagtggtggctgccaatgacctcaagtggcagacttctggcatcttccggccgttcatcgaggtcaacatcattgggccccagctcagcgacaagaaacgcaagtttgcgaccaaatccaagaacaatagctgggctcccaagtacaatgagagcttccagttcacgctgagcgccgacgcgggtcccgagtgctatgagctgcaggtgtgcgtcaaggactactgcttcgcgcgcgaggaccgcacggtggggctggccgtgctgcagctgcgtgagctggcccagcgcgggagcgccgcctgctggctgccgctcggccgccgcatccacatggacgacacgggcctcacggtgctgcgaatcctctcgcagcgcagcaacgacgaggtggccaaggagttcgtgaagctcaagtcggacacgcgctccgccgaggagggcggtgccgcgcctgcgccttagcgcgggcggtcggccgagcggcactgcgcctgcgcggagggcgctgggcggggagggacggggcttgcgccttggtgggacctccccaggggcggggctcggggggctccacgccaagggtgggctgcgcctacgcccttgactcagctttcccttttggggaattaggaatggaggatgccccgccctctcgggaggccacgcccaagggcgcgacgaaggaaggagccacatccccaacttgaggccacgcccccagcacctagggggcattttgagctgggatgggggaaacctcgtccctatggaggaggccacatcccggggctctggtaccgggaggcaccacctcatgtcccctggaaaagccataagatgggacccagacccctgggaccccagaccaattgccaagtatggaaatctcagctccctcgagggggggccctgggcaaggggtagggctctctggagcgcccctctaggtggcctggggactggagggaccaggatgctggttggagggccccggaataccggagtccctttagatatttgtgcaaaaaataaatggggggaggggggaggatgggatttcaaaagcacatgcgcccttgggcgcccaaaccctgggggccgaggggacggctctggttccccacgctgcccctacttccctttgggagtttgcctctccctctcccccaacaaacccagtcctcatatcatagagttcaacacacccatttgacagatggcaaaactgaggcttaaagagctgcttgagacttggccaaggttccaggtgccataccctctgtgcccctcccttaggcctgtgtgccccatggaagggtgggctgagatcgggatgacctgacacagctccctattgctgctaattccccctcggcctcctccaaggggtgggaattccaggccaagacccctacttcgcctttccttctccggctgccaagcaggacctttgccctcagccctttctcctgggatctccatgggggatgccatgagggcctcccaccacaaaagagaatttgggatcccctggtcccaggtttctccatcccttcttccttttccagaattttccaaataggaaagaacagaaggagaccagaaactctaggggggagaaagagaatgagagaaagagaatgagagagagagaaacacaaacacagtgacacagtgagagcttagtctccaagagcctattcattgattcaaacacccaagccacaggatacctcagatggccctcttgccagctggaagctctttctccaatgagcaaagttacagtgacctggctggagttacctggtgcacataggaccttaggggaaagttcagcgtggactacacttgctctgggatctgcttttccacatgtgtgtatggcacgcctttttctgctggattgggaaggacaagattttgctgtgctagggagaaatgaaaacggggtgagctgagtagctgggtttctggaggatagaacatcagatggggaggctttccgaggtgaagaatgagagggaaccacttactagagagaaaagagctccaggcctggggaacagcacgtgcgaaggccaggagagaagaactgttgaaacaacgagaagggtggcacggctggagctgagccagcaagggggatcgtgaggagccttggggttggggagatctgcagaagcatcagaccaggcagggcctcgtacgcagtcctgaggagttttacttttattctaagacagttggggagctccaggagctgttttaagttggggagagactggattccagcctgcaaaagctgttttgtgaagactaaaaccagtgaggagaggtggaggtgctttggggacactgaaatggattcttggaaagattctgaaggctgtgttgaaaagacacctatagctgtggggacatgactataatcccagcatttggggagaccgaggctggcagatcacttaaggtcaggagtttgagaccagcctggccaacatggcgaaaccccatctctgctaaaaatacaaaaattagctgggtgcagtggtgcatgcctgtagtcccagctactcaggagactgaggcgggagaattgtttgaaccctggaggcagaggttgtagtgagtcgtgatcacacaactgcactccagcctgggcaacagaacaatactccattccctcccctctaccccaccaaaaaaaaaaaaaaatcctgcccttagatgagctctagggctgctgagtacagttgtcccagttgcacagtgcccaagggtttggcattgctaagaaggccacgtgcaaatcctagatattgagtgttgtatgtttgtgacgttggtttcccgacatgtgaatggcccaagtgtctggaagaagtggcgccactttctaatttgcttggagatgttgcatgtcccttaaattcagacaggtgcaggtaactggaggttctgaaccaaaggttaaaatgcaaattctcatacagggttgggaagttgtagccagggataagcttatgtgactgttatatggactgaggagcagatgtgaatttcgaaccatgacatggctgagggtaggggtcgggtggatggatgattcagggttgtaacccatagagcccaaaggggaagtgatctgtgacctggggtgagggtgatctggaagatttttggatggctggaaagaaatggggaagtcgagctgcctgagagagccaagttatttcccaaaagattccttaggagtctttctgttcaagacctccgtgtgtgtgtgtgtgtgtttagggttccccagcaatggcccaggcatgtgaaggaaacaagcttcttcagggaatatttgttgaatgagttttcctgactcccaggctagaactgtttttgcaatttccaccctcttttctttcccccagagaactcctattcgtccttcaaaacccatcacggaaacccctcttggagaaaaccctccttccttcccctcaggactttcccagccaccgtctctcctccagtccagcctgatgccatgggactgggggtttctctgtccagctctgtttctcccagactggggtctgaggactctcaggacccccaactttacctagcacaggctgggcacaagtgggtgacagggagtctacgcctagtggaattatgtattggggcagggtcagtgtgagaatacacatccgcatgcatgtctgtccatgtctgtccgtaccaaccttccccttccacacggacctgggcacataggaggtgtctgagcctgacacatgggacagagagtggacatggctgagacacggacagagaaaagacaaggagtccagggggctgaaagccttttgaaatcaggaagttcctgtattggcagaacaaagcccagagaggagcagggctttcctcaacgccacccagcaagtggacacagagcccggccttggatgacacctccagggttctgaaccctggacctcgctttatgcaaggagctggccccacatttccatgaatcggggaaacagcacaagaaggttggcctgtggcagggcaagggttaaaggggtgacattgagggatgcctcagagtcaaagtcccctgaccaagaggaatagagtagaaaacacagagacagagggtgagatcacgccccgatgaggacggagagagacagagatggagagagacatagaggtggaaatatacagagaaagataaatgcagagaccaaggcagggagtgtcgggggaagtaaagagggtgtcctgaagaaagaaggatctgttcactcttaccagtctgtcctcgaatgatttgcataaaatgaggaggtgcctgtccacacccccaattcctctctcaggccccagagcctgagacctcaccatgcccccatcagagatgcaaaaaactaaacacccaactagaaatccttgggacctctctcggctgggatctcagagcctttctgtcccctacccctaccccatgtgctgtcgattttgcagatggggacaacctggggcctcccggaactctgccaccctggggaagttgggggagggccttagtcccggatcacaaccccgtctgctccccagaatcctttcctaagaatcgttgaggaccaaagttgtctttgctgacacgtgttgcttttctctttgccttttattgtttcagagaaaaatcaagttgactgtgtcaagtaacaccccaccccttacccccgtccagccatagtggctctctggagacacaggtcacaggcggagggtcccctgatcatccccaaccacacagccagggggacttgacccctgtccacccctgtctcgtgctccctcagacccccacaaaccggccaagcagtccggggaggcttcccctccacacaactcttagcatgtgattgcagatgtgaaatcaaaacgttgtttgttttttgttttgttttgattctaccccgtcggtccagtgtctgcacagacgccttcatttctctgtaaatatgtgacttggaacaaatgtttaacacaaacgagaagtggtcatgaatgcatggtgttgagatgttttgcactattctgactttttggtctctgtaaaaatattttattaacagcagacattaaaaaaagaaaaaccacacacagccttgga

SEQ ID NO: 5062 - RNA, 9980 nt, Homo sapiens
  source 1..9980: mol_type = mRNA
ctgaaccaagatggccggtggcggccgggccccggcgtgagccaagcgcgggctgcagccgggagatgccccagcccagcggccgctgagcccgacccgacagagccggcccggccgcctccggcccacctgcgagctcggagacatgtctctgctttgcgttggagtcaaaaaagccaagtttgatggtgcccaagagaaattcaacacgtacgtgaccctgaaagtgcagaatgtcaagagcacgaccatcgcggtgcggggcagccagcccagctgggagcaggatttcatgttcgagattaaccgtctggatttgggactgacggtggaggtgtggaataagggtctcatctgggacacaatggtgggcactgtgtggatcccactgaggaccatccgccagtccaatgaggagggccctggagagtggctgacgctggactcccaggtcatcatggcagacagtgagatctgtggcaccaaggaccccaccttccaccgcatcctcctggacacgcgctttgagctacccttagacattcctgaagaggaggctcgctactgggccaagaagctggagcagctcaatgctatgcgggaccaggatgaatattcgttccaagatgagcaagacaagcctctgcctgtccccagcaaccagtgctgcaactggaattattttggctggggtgagcagcacaacgatgaccccgacagtgcagtggatgatcgtgacagtgactaccgcagtgaaacgagcaacagcatcccgccgccctattatactacgtcacaacccaacgcctcagtccaccaatattctgttcgcccaccacccctgggctcccgggagtcctacagtgactccatgcacagttacgaggagttctctgagccacaagccctcagccccacgggtagcagccgctatgcctcttccggggagctgagccagggaagctctcagctgagcgaggacttcgaccctgacgagcacagcctgcagggctccgacatggaggatgagcgggaccgggactcctaccactcctgccacagctcggtcagctaccacaaagactcgcctcgctgggaccaggatgaggaagagctggaggaggacctggaggacttcctggaggaggaggagctgcctgaagatgaggaggagctggaggaggaggaggaggaggtgcctgacgatttgggcagctatgcccagcgtgaagacgtagctgtggctgagcccaaagacttcaaacgcatcagcctcccgccagctgccccagggaaggaggacaaggccccagtggcacccaccgaggcccccgacatggccaaggtggcccccaagccagccacgcccgacaaggtgcctgcagctgagcagatccctgaggctgagccacccaaggacgaggagagtttcaggccgagagaggatgaggaaggccaggaggggcaggactccatgtccagggccaaggccaactggctgcgtgccttcaacaaggtgcggatgcagctgcaggaggcccggggagaaggagagatgtctaaatccctatggttcaaaggcggcccagggggcggtctcatcatcatcgacagcatgccagacatccgcaagaggaaacctatcccactcgtgagcgacttggccatgtccctggtccagtccaggaaagcgggcatcacctcggccttggcctccagcacgttgaacaacgaggagctgaaaaaccacgtttacaagaagaccctgcaagccttaatctaccccatctcgtgcacgacgccacacaacttcgaagtgtggacggccaccacgcccacctactgctacgagtgcgaggggctgctgtggggcatcgcgaggcagggcatgcgctgcaccgagtgcggtgtcaagtgccacgagaagtgccaggacctgctcaacgccgactgcctgcagcgggctgcggagaagagctccaagcacggggcggaggaccggacacagaacatcatcatggtgctcaaggaccgcatgaagatccgggagcgcaacaagcccgagatcttcgagctcatccaggagatcttcgcggtgaccaagacggcgcacacgcagcagatgaaggcggtcaagcagagcgtgctggacggcacgtccaagtggtccgccaagatcagcatcaccgtggtctgcgcccagggcttgcaggcaaaggacaagacaggatccagtgacccctatgtcaccgtccaggtcgggaagaccaagaaacggacaaaaaccatctatgggaacctcaacccggtgtgggaggagaatttccactttgaatgtcacaattcctccgaccgcatcaaggtgcgcgtctgggacgaggatgacgacatcaaatcccgcgtgaaacagaggttcaagagggaatctgacgatttcctggggcagacgatcattgaggtgcggacgctcagcggcgagatggacgtgtggtacaacctggacaagcgaactgacaaatctgccgtgtcgggtgccatccggctccacatcagtgtggagatcaaaggcgaggagaaggtggccccgtaccatgtccagtacacctgtctgcatgagaacctgttccacttcgtgaccgacgtgcagaacaatggggtcgtgaagatcccagatgccaagggtgacgatgcctggaaggtttactacgatgagacagcccaggagattgtggacgagtttgccatgcgctacggcgtcgagtccatctaccaagccatgacccactttgcctgcctctcctccaagtatatgtgcccaggggtgcctgccgtcatgagcaccctgctcgccaacatcaatgcctactacgcacacaccaccgcctccaccaacgtgtctgcctccgaccgcttcgccgcctccaactttgggaaagagcgcttcgtgaaactcctggaccagctgcataactccctgcggattgacctctccatgtaccggaataacttcccagccagcagcccggagagactccaggacctcaaatccactgtggaccttctcaccagcatcaccttctttcggatgaaggtacaagaactccagagcccgccccgagccagccaggtggtaaaggactgtgtgaaagcctgccttaattctacctacgagtacatcttcaataactgccatgaactgtacagccgggagtaccagacagacccggccaagaagggggaagttctcccagaggaacaggggcccagcatcaagaacctcgacttctggtccaagctgattaccctcatagtgtccatcattgaggaagacaagaattcctacactccctgcctcaaccagtttccccaggagctgaatgtgggtaaaatcagcgctgaagtgatgtggaatctgtttgcccaagacatgaagtacgccatggaggagcacgacaagcatcgtctatgcaagagtgccgactacatgaacctccacttcaaggtgaaatggctctacaatgagtatgtgacggaacttcccgccttcaaggaccgcgtgcctgagtaccctgcatggtttgaacccttcgtcatccagtggctggatgagaatgaggaggtgtcccgggatttcctgcacggtgccctggagcgagacaagaaggatgggttccagcagacctcagagcatgccctattctcctgctccgtggtggatgttttctcccaactcaaccagagctttgaaatcatcaagaaactcgagtgtcccgaccctcagatcgtggggcactacatgaggcgctttgccaagaccatcagtaatgtgctcctccagtatgcagacatcatctccaaggactttgcctcctactgctccaaggagaaggagaaaccctgcattctcatgaataacactcaacagctacgagttcagctggagaagatgttcgaagccatgggaggaaaggagctggatgctgaagccagtgacatcctgaaggagcttcaggtgaaactcaataacgtcttggatgagctcagccgggtgtttgctaccagcttccagccgcacattgaagagtgtgtcaaacagatgggtgacatccttagccaggttaagggcacaggcaatgtgccagccagtgcctgcagcagcgtggcccaggacgcggacaatgtgttgcagcccatcatggacctgctggacagcaacctgaccctctttgccaaaatctgtgagaagactgtgctgaagcgagtgctgaaggagctgtggaagctggttatgaacaccatggagaaaaccatcgtcctgccgcccctcactgaccagacgatgatcgggaacctcttgagaaaacatggcaagggattagaaaagggcagggtgaaattgccaagccactcagacggaacccagatgatcttcaatgcagccaaggagctgggtcagctgtccaaactcaaggatcacatggtacgagaagaagccaagagcttgaccccaaagcagtgcgcggttgttgagttggccctggacaccatcaagcaatatttccacgcgggtggcgtgggcctcaagaagaccttcctggagaagagcccggacctgcaatccttgcgctatgccctgtcgctctacacgcaggccaccgacctgctaatcaagacctttgtacagacgcaatcggcccagggcttgggtgtagaagaccctgtgggtgaagtctctgtccatgttgagctgttcactcatccaggaactggggaacacaaggtcacagtgaaagtggtggctgccaatgacctcaagtggcagacttctggcatcttccggccgttcatcgaggtcaacatcattgggccccagctcagcgacaagaaacgcaagtttgcgaccaaatccaagaacaatagctgggctcccaagtacaatgagagcttccagttcacgctgagcgccgacgcgggtcccgagtgctatgagctgcaggtgtgcgtcaaggactactgcttcgcgcgcgaggaccgcacggtggggctggccgtgctgcagctgcgtgagctggcccagcgcgggagcgccgcctgctggctgccgctcggccgccgcatccacatggacgacacgggcctcacggtgctgcgaatcctctcgcagcgcagcaacgacgaggtggccaaggagttcgtgaagctcaagtcggacacgcgctccgccgaggagggcggtgccgcgcctgcgccttagcgcgggcggtcggccgagcggcactgcgcctgcgcggagggcgctgggcggggagggacggggcttgcgccttggtgggacctccccaggggcggggctcggggggctccacgccaagggtgggctgcgcctacgcccttgactcagctttcccttttggggaattaggaatggaggatgccccgccctctcgggaggccacgcccaagggcgcgacgaaggaaggagccacatccccaacttgaggccacgcccccagcacctagggggcattttgagctgggatgggggaaacctcgtccctatggaggaggccacatcccggggctctggtaccgggaggcaccacctcatgtcccctggaaaagccataagatgggacccagacccctgggaccccagaccaattgccaagtatggaaatctcagctccctcgagggggggccctgggcaaggggtagggctctctggagcgcccctctaggtggcctggggactggagggaccaggatgctggttggagggccccggaataccggagtccctttagatatttgtgcaaaaaataaatggggggaggggggaggatgggatttcaaaagcacatgcgcccttgggcgcccaaaccctgggggccgaggggacggctctggttccccacgctgcccctacttccctttgggagtttgcctctccctctcccccaacaaacccagtcctcatatcatagagttcaacacacccatttgacagatggcaaaactgaggcttaaagagctgcttgagacttggccaaggttccaggtgccataccctctgtgcccctcccttaggcctgtgtgccccatggaagggtgggctgagatcgggatgacctgacacagctccctattgctgctaattccccctcggcctcctccaaggggtgggaattccaggccaagacccctacttcgcctttccttctccggctgccaagcaggacctttgccctcagccctttctcctgggatctccatgggggatgccatgagggcctcccaccacaaaagagaatttgggatcccctggtcccaggtttctccatcccttcttccttttccagaattttccaaataggaaagaacagaaggagaccagaaactctaggggggagaaagagaatgagagaaagagaatgagagagagagaaacacaaacacagtgacacagtgagagcttagtctccaagagcctattcattgattcaaacacccaagccacaggatacctcagatggccctcttgccagctggaagctctttctccaatgagcaaagttacagtgacctggctggagttacctggtgcacataggaccttaggggaaagttcagcgtggactacacttgctctgggatctgcttttccacatgtgtgtatggcacgcctttttctgctggattgggaaggacaagattttgctgtgctagggagaaatgaaaacggggtgagctgagtagctgggtttctggaggatagaacatcagatggggaggctttccgaggtgaagaatgagagggaaccacttactagagagaaaagagctccaggcctggggaacagcacgtgcgaaggccaggagagaagaactgttgaaacaacgagaagggtggcacggctggagctgagccagcaagggggatcgtgaggagccttggggttggggagatctgcagaagcatcagaccaggcagggcctcgtacgcagtcctgaggagttttacttttattctaagacagttggggagctccaggagctgttttaagttggggagagactggattccagcctgcaaaagctgttttgtgaagactaaaaccagtgaggagaggtggaggtgctttggggacactgaaatggattcttggaaagattctgaaggctgtgttgaaaagacacctatagctgtggggacatgactataatcccagcatttggggagaccgaggctggcagatcacttaaggtcaggagtttgagaccagcctggccaacatggcgaaaccccatctctgctaaaaatacaaaaattagctgggtgcagtggtgcatgcctgtagtcccagctactcaggagactgaggcgggagaattgtttgaaccctggaggcagaggttgtagtgagtcgtgatcacacaactgcactccagcctgggcaacagaacaatactccattccctcccctctaccccaccaaaaaaaaaaaaaaatcctgcccttagatgagctctagggctgctgagtacagttgtcccagttgcacagtgcccaagggtttggcattgctaagaaggccacgtgcaaatcctagatattgagtgttgtatgtttgtgacgttggtttcccgacatgtgaatggcccaagtgtctggaagaagtggcgccactttctaatttgcttggagatgttgcatgtcccttaaattcagacaggtgcaggtaactggaggttctgaaccaaaggttaaaatgcaaattctcatacagggttgggaagttgtagccagggataagcttatgtgactgttatatggactgaggagcagatgtgaatttcgaaccatgacatggctgagggtaggggtcgggtggatggatgattcagggttgtaacccatagagcccaaaggggaagtgatctgtgacctggggtgagggtgatctggaagatttttggatggctggaaagaaatggggaagtcgagctgcctgagagagccaagttatttcccaaaagattccttaggagtctttctgttcaagacctccgtgtgtgtgtgtgtgtgtttagggttccccagcaatggcccaggcatgtgaaggaaacaagcttcttcagggaatatttgttgaatgagttttcctgactcccaggctagaactgtttttgcaatttccaccctcttttctttcccccagagaactcctattcgtccttcaaaacccatcacggaaacccctcttggagaaaaccctccttccttcccctcaggactttcccagccaccgtctctcctccagtccagcctgatgccatgggactgggggtttctctgtccagctctgtttctcccagactggggtctgaggactctcaggacccccaactttacctagcacaggctgggcacaagtgggtgacagggagtctacgcctagtggaattatgtattggggcagggtcagtgtgagaatacacatccgcatgcatgtctgtccatgtctgtccgtaccaaccttccccttccacacggacctgggcacataggaggtgtctgagcctgacacatgggacagagagtggacatggctgagacacggacagagaaaagacaaggagtccagggggctgaaagccttttgaaatcaggaagttcctgtattggcagaacaaagcccagagaggagcagggctttcctcaacgccacccagcaagtggacacagagcccggccttggatgacacctccagggttctgaaccctggacctcgctttatgcaaggagctggccccacatttccatgaatcggggaaacagcacaagaaggttggcctgtggcagggcaagggttaaaggggtgacattgagggatgcctcagagtcaaagtcccctgaccaagaggaatagagtagaaaacacagagacagagggtgagatcacgccccgatgaggacggagagagacagagatggagagagacatagaggtggaaatatacagagaaagataaatgcagagaccaaggcagggagtgtcgggggaagtaaagagggtgtcctgaagaaagaaggatctgttcactcttaccagtctgtcctcgaatgatttgcataaaatgaggaggtgcctgtccacacccccaattcctctctcaggccccagagcctgagacctcaccatgcccccatcagagatgcaaaaaactaaacacccaactagaaatccttgggacctctctcggctgggatctcagagcctttctgtcccctacccctaccccatgtgctgtcgattttgcagatggggacaacctggggcctcccggaactctgccaccctggggaagttgggggagggccttagtcccggatcacaaccccgtctgctccccagaatcctttcctaagaatcgttgaggaccaaagttgtctttgctgacacgtgttgcttttctctttgccttttattgtttcagagaaaaatcaagttgactgtgtcaagtaacaccccaccccttacccccgtccagccatagtggctctctggagacacaggtcacaggcggagggtcccctgatcatccccaaccacacagccagggggacttgacccctgtccacccctgtctcgtgctccctcagacccccacaaaccggccaagcagtccggggaggcttcccctccacacaactcttagcatgtgattgcagatgtgaaatcaaaacgttgtttgttttttgttttgttttgattctaccccgtcggtccagtgtctgcacagacgccttcatttctctgtaaatatgtgacttggaacaaatgtttaacacaaacgagaagtggtcatgaatgcatggtgttgagatgttttgcactattctgactttttggtctctgtaaaaatattttattaacagcagacattaaaaaaagaaaaaccacacacagccttgga

SEQ ID NO: 5063 - RNA, 9914 nt, Homo sapiens
  source 1..9914: mol_type = mRNA
ctgaaccaagatggccggtggcggccgggccccggcgtgagccaagcgcgggctgcagccgggagatgccccagcccagcggccgctgagcccgacccgacagagccggcccggccgcctccggcccacctgcgagctcggagacatgtctctgctttgcgttggagtcaaaaaagccaagtttgatggtgcccaagagaaattcaacacgtacgtgaccctgaaagtgcagaatgtcaagagcacgaccatcgcggtgcggggcagccagcccagctgggagcaggatttcatgttcgagattaaccgtctggatttgggactgacggtggaggtgtggaataagggtctcatctgggacacaatggtgggcactgtgtggatcccactgaggaccatccgccagtccaatgaggagggccctggagagtggctgacgctggactcccaggtcatcatggcagacagtgagatctgtggcaccaaggaccccaccttccaccgcatcctcctggacacgcgctttgagctacccttagacattcctgaagaggaggctcgctactgggccaagaagctggagcagctcaatgctatgcgggaccaggatgaatattcgttccaagatgagcaagacaagcctctgcctgtccccagcaaccagtgctgcaactggaattattttggctggggtgagcagcacaacgatgaccccgacagtgcagtggatgatcgtgacagtgactaccgcagtgaaacgagcaacagcatcccgccgccctattatactacgtcacaacccaacgcctcagtccaccaatattctgttcgcccaccacccctgggctcccgggagtcctacagtgactccatgcacagttacgaggagttctctgagccacaagccctcagccccacgggtagcagccgctatgcctcttccggggagctgagccagggaagctctcagctgagcgaggacttcgaccctgacgagcacagcctgcagggctccgacatggaggatgagcgggaccgggactcctaccactcctgccacagctcggtcagctaccacaaagactcgcctcgctgggaccaggatgaggaagagctggaggaggacctggaggacttcctggaggaggaggagctgcctgaagatgaggaggagctggaggaggaggaggaggaggtgcctgacgatttgggcagctatgcccagcgtgaagacgtagctgtggctgagcccaaagacttcaaacgcatcagcctcccgccagctgccccagggaaggaggacaaggccccagtggcacccaccgaggcccccgacatggccaaggtggcccccaagccagccacgcccgacaaggtgcctgcagctgagcagatccctgaggctgagccacccaaggacgaggagagtttcaggccgagagaggatgaggaaggccaggaggggcaggactccatgtccagggccaaggccaactggctgcgtgccttcaacaaggtgcggatgcagctgcaggaggcccggggagaaggagagatgtctaaatccctatggttcaaaggcggcccagggggcggtctcatcatcatcgacagcatgccagacatccgcaagaggaaacctatcccactcgtgagcgacttggccatgtccctggtccagtccaggaaagcgggcatcacctcggccttggcctccagcacgttgaacaacgaggagctgaaaaaccacgtttacaagaagaccctgcaagccttaatctaccccatctcgtgcacgacgccacacaacttcgaagtgtggacggccaccacgcccacctactgctacgagtgcgaggggctgctgtggggcatcgcgaggcagggcatgcgctgcaccgagtgcggtgtcaagtgccacgagaagtgccaggacctgctcaacgccgactgcctgcagcgggctgcggagaagagctccaagcacggggcggaggaccggacacagaacatcatcatggtgctcaaggaccgcatgaagatccgggagcgcaacaagcccgagatcttcgagctcatccaggagatcttcgcggtgaccaagacggcgcacacgcagcagatgaaggcggtcaagcagagcgtgctggacggcacgtccaagtggtccgccaagatcagcatcaccgtggtctgcgcccagggcttgcaggcaaaggacaagacaggatccagtgacccctatgtcaccgtccaggtcgggaagaccaagaaacggacaaaaaccatctatgggaacctcaacccggtgtgggaggagaatttccactttgaatgtcacaattcctccgaccgcatcaaggtgcgcgtctgggacgaggatgacgacatcaaatcccgcgtgaaacagaggttcaagagggaatctgacgatttcctggggcagacgatcattgaggtgcggacgctcagcggcgagatggacgtgtggtacaacctggacaagcgaactgacaaatctgccgtgtcgggtgccatccggctccacatcagtgtggagatcaaaggcgaggagaaggtggccccgtaccatgtccagtacacctgtctgcatgagaacctgttccacttcgtgaccgacgtgcagaacaatggggtcgtgaagatcccagatgccaagggtgacgatgcctggaaggtttactacgatgagacagcccaggagattgtggacgagtttgccatgcgctacggcgtcgagtccatctaccaagccatgacccactttgcctgcctctcctccaagtatatgtgcccaggggtgcctgccgtcatgagcaccctgctcgccaacatcaatgcctactacgcacacaccaccgcctccaccaacgtgtctgcctccgaccgcttcgccgcctccaactttgggaaagagcgcttcgtgaaactcctggaccagctgcataactccctgcggattgacctctccatgtaccggaataacttcccagccagcagcccggagagactccaggacctcaaatccactgtggaccttctcaccagcatcaccttctttcggatgaaggtacaagaactccagagcccgccccgagccagccaggtggtaaaggactgtgtgaaagcctgccttaattctacctacgagtacatcttcaataactgccatgaactgtacagccgggagtaccagacagacccggccaagaagggggaagttctcccagaggaacaggggcccagcatcaagaacctcgacttctggtccaagctgattaccctcatagtgtccatcattgaggaagacaagaattcctacactccctgcctcaaccagtttccccaggagctgaatgtgggtaaaatcagcgctgaagtgatgtggaatctgtttgcccaagacatgaagtacgccatggaggagcacgacaagcatcgtctatgcaagagtgccgactacatgaacctccacttcaaggtgaaatggctctacaatgagtatgtgacggaacttcccgccttcaaggaccgcgtgcctgagtaccctgcatggtttgaacccttcgtcatccagtggctggatgagaatgaggaggtgtcccgggatttcctgcacggtgccctggagcgagacaagaaggatgggttccagcagacctcagagcatgccctattctcctgctccgtggtggatgttttctcccaactcaaccagagctttgaaatcatcaagaaactcgagtgtcccgaccctcagatcgtggggcactacatgaggcgctttgccaagaccatcagtaatgtgctcctccagtatgcagacatcatctccaaggactttgcctcctactgctccaaggagaaggagaaagtgccctgcattctcatgaataacactcaacagctacgagttcagctggagaagatgttcgaagccatgggaggaaaggagctggatgctgaagccagtgacatcctgaaggagcttcaggtgaaactcaataacgtcttggatgagctcagccgggtgtttgctaccagcttccagccgcacattgaagagtgtgtcaaacagatgggtgacatccttagccaggttaagggcacaggcaatgtgccagccagtgcctgcagcagcgtggcccaggacgcggacaatgtgttgcagcccatcatggacctgctggacagcaacctgaccctctttgccaaaatctgtgagaagactgtgctgaagcgagtgctgaaggagctgtggaagctggttatgaacaccatggagaaaaccatcgtcctgccgcccctcactgaccagacgatgatcggaacccagatgatcttcaatgcagccaaggagctgggtcagctgtccaaactcaaggatcacatggtacgagaagaagccaagagcttgaccccaaagcagtgcgcggttgttgagttggccctggacaccatcaagcaatatttccacgcgggtggcgtgggcctcaagaagaccttcctggagaagagcccggacctgcaatccttgcgctatgccctgtcgctctacacgcaggccaccgacctgctaatcaagacctttgtacagacgcaatcggcccagggcttgggtgtagaagaccctgtgggtgaagtctctgtccatgttgagctgttcactcatccaggaactggggaacacaaggtcacagtgaaagtggtggctgccaatgacctcaagtggcagacttctggcatcttccggccgttcatcgaggtcaacatcattgggccccagctcagcgacaagaaacgcaagtttgcgaccaaatccaagaacaatagctgggctcccaagtacaatgagagcttccagttcacgctgagcgccgacgcgggtcccgagtgctatgagctgcaggtgtgcgtcaaggactactgcttcgcgcgcgaggaccgcacggtggggctggccgtgctgcagctgcgtgagctggcccagcgcgggagcgccgcctgctggctgccgctcggccgccgcatccacatggacgacacgggcctcacggtgctgcgaatcctctcgcagcgcagcaacgacgaggtggccaaggagttcgtgaagctcaagtcggacacgcgctccgccgaggagggcggtgccgcgcctgcgccttagcgcgggcggtcggccgagcggcactgcgcctgcgcggagggcgctgggcggggagggacggggcttgcgccttggtgggacctccccaggggcggggctcggggggctccacgccaagggtgggctgcgcctacgcccttgactcagctttcccttttggggaattaggaatggaggatgccccgccctctcgggaggccacgcccaagggcgcgacgaaggaaggagccacatccccaacttgaggccacgcccccagcacctagggggcattttgagctgggatgggggaaacctcgtccctatggaggaggccacatcccggggctctggtaccgggaggcaccacctcatgtcccctggaaaagccataagatgggacccagacccctgggaccccagaccaattgccaagtatggaaatctcagctccctcgagggggggccctgggcaaggggtagggctctctggagcgcccctctaggtggcctggggactggagggaccaggatgctggttggagggccccggaataccggagtccctttagatatttgtgcaaaaaataaatggggggaggggggaggatgggatttcaaaagcacatgcgcccttgggcgcccaaaccctgggggccgaggggacggctctggttccccacgctgcccctacttccctttgggagtttgcctctccctctcccccaacaaacccagtcctcatatcatagagttcaacacacccatttgacagatggcaaaactgaggcttaaagagctgcttgagacttggccaaggttccaggtgccataccctctgtgcccctcccttaggcctgtgtgccccatggaagggtgggctgagatcgggatgacctgacacagctccctattgctgctaattccccctcggcctcctccaaggggtgggaattccaggccaagacccctacttcgcctttccttctccggctgccaagcaggacctttgccctcagccctttctcctgggatctccatgggggatgccatgagggcctcccaccacaaaagagaatttgggatcccctggtcccaggtttctccatcccttcttccttttccagaattttccaaataggaaagaacagaaggagaccagaaactctaggggggagaaagagaatgagagaaagagaatgagagagagagaaacacaaacacagtgacacagtgagagcttagtctccaagagcctattcattgattcaaacacccaagccacaggatacctcagatggccctcttgccagctggaagctctttctccaatgagcaaagttacagtgacctggctggagttacctggtgcacataggaccttaggggaaagttcagcgtggactacacttgctctgggatctgcttttccacatgtgtgtatggcacgcctttttctgctggattgggaaggacaagattttgctgtgctagggagaaatgaaaacggggtgagctgagtagctgggtttctggaggatagaacatcagatggggaggctttccgaggtgaagaatgagagggaaccacttactagagagaaaagagctccaggcctggggaacagcacgtgcgaaggccaggagagaagaactgttgaaacaacgagaagggtggcacggctggagctgagccagcaagggggatcgtgaggagccttggggttggggagatctgcagaagcatcagaccaggcagggcctcgtacgcagtcctgaggagttttacttttattctaagacagttggggagctccaggagctgttttaagttggggagagactggattccagcctgcaaaagctgttttgtgaagactaaaaccagtgaggagaggtggaggtgctttggggacactgaaatggattcttggaaagattctgaaggctgtgttgaaaagacacctatagctgtggggacatgactataatcccagcatttggggagaccgaggctggcagatcacttaaggtcaggagtttgagaccagcctggccaacatggcgaaaccccatctctgctaaaaatacaaaaattagctgggtgcagtggtgcatgcctgtagtcccagctactcaggagactgaggcgggagaattgtttgaaccctggaggcagaggttgtagtgagtcgtgatcacacaactgcactccagcctgggcaacagaacaatactccattccctcccctctaccccaccaaaaaaaaaaaaaaatcctgcccttagatgagctctagggctgctgagtacagttgtcccagttgcacagtgcccaagggtttggcattgctaagaaggccacgtgcaaatcctagatattgagtgttgtatgtttgtgacgttggtttcccgacatgtgaatggcccaagtgtctggaagaagtggcgccactttctaatttgcttggagatgttgcatgtcccttaaattcagacaggtgcaggtaactggaggttctgaaccaaaggttaaaatgcaaattctcatacagggttgggaagttgtagccagggataagcttatgtgactgttatatggactgaggagcagatgtgaatttcgaaccatgacatggctgagggtaggggtcgggtggatggatgattcagggttgtaacccatagagcccaaaggggaagtgatctgtgacctggggtgagggtgatctggaagatttttggatggctggaaagaaatggggaagtcgagctgcctgagagagccaagttatttcccaaaagattccttaggagtctttctgttcaagacctccgtgtgtgtgtgtgtgtgtttagggttccccagcaatggcccaggcatgtgaaggaaacaagcttcttcagggaatatttgttgaatgagttttcctgactcccaggctagaactgtttttgcaatttccaccctcttttctttcccccagagaactcctattcgtccttcaaaacccatcacggaaacccctcttggagaaaaccctccttccttcccctcaggactttcccagccaccgtctctcctccagtccagcctgatgccatgggactgggggtttctctgtccagctctgtttctcccagactggggtctgaggactctcaggacccccaactttacctagcacaggctgggcacaagtgggtgacagggagtctacgcctagtggaattatgtattggggcagggtcagtgtgagaatacacatccgcatgcatgtctgtccatgtctgtccgtaccaaccttccccttccacacggacctgggcacataggaggtgtctgagcctgacacatgggacagagagtggacatggctgagacacggacagagaaaagacaaggagtccagggggctgaaagccttttgaaatcaggaagttcctgtattggcagaacaaagcccagagaggagcagggctttcctcaacgccacccagcaagtggacacagagcccggccttggatgacacctccagggttctgaaccctggacctcgctttatgcaaggagctggccccacatttccatgaatcggggaaacagcacaagaaggttggcctgtggcagggcaagggttaaaggggtgacattgagggatgcctcagagtcaaagtcccctgaccaagaggaatagagtagaaaacacagagacagagggtgagatcacgccccgatgaggacggagagagacagagatggagagagacatagaggtggaaatatacagagaaagataaatgcagagaccaaggcagggagtgtcgggggaagtaaagagggtgtcctgaagaaagaaggatctgttcactcttaccagtctgtcctcgaatgatttgcataaaatgaggaggtgcctgtccacacccccaattcctctctcaggccccagagcctgagacctcaccatgcccccatcagagatgcaaaaaactaaacacccaactagaaatccttgggacctctctcggctgggatctcagagcctttctgtcccctacccctaccccatgtgctgtcgattttgcagatggggacaacctggggcctcccggaactctgccaccctggggaagttgggggagggccttagtcccggatcacaaccccgtctgctccccagaatcctttcctaagaatcgttgaggaccaaagttgtctttgctgacacgtgttgcttttctctttgccttttattgtttcagagaaaaatcaagttgactgtgtcaagtaacaccccaccccttacccccgtccagccatagtggctctctggagacacaggtcacaggcggagggtcccctgatcatccccaaccacacagccagggggacttgacccctgtccacccctgtctcgtgctccctcagacccccacaaaccggccaagcagtccggggaggcttcccctccacacaactcttagcatgtgattgcagatgtgaaatcaaaacgttgtttgttttttgttttgttttgattctaccccgtcggtccagtgtctgcacagacgccttcatttctctgtaaatatgtgacttggaacaaatgtttaacacaaacgagaagtggtcatgaatgcatggtgttgagatgttttgcactattctgactttttggtctctgtaaaaatattttattaacagcagacattaaaaaaagaaaaaccacacacagccttgga

SEQ ID NO: 5064 - DNA, 94017 bp, Homo sapiens
  source 1..94017: mol_type = genomic DNA
cagtggctcacacctgtaatcccagcactttgggaggccgaggtgggtggatcacttgaggtcaggagttggagaccagcttggccaacatggtgaaaccctgtctctacaaaaaatacaaaaattagccgggcatgatagagagtgtacctgtaatcccagctactcgggaggctgaggcaggacaatcccttgaatctgcgagacaggttacagtgagctgagatctcaacactgcactccagcctgggcgacagagcaagactccatctcaaaatgtaccctgtaacaatatataagatgtcaacattagtagaagcactcaagcctagatgatagagagagattcagtctcaaaaaaaaaaaaaaaaaaaaaaagagaaagaaatggataaaagacttgaacaggcatttcaccataaaaagaaaccagtaatcacataaaaagttcaacgtcaagagcaatcagaaagcaaaccaaaacccaaatgaggcactccttccctccctccacataggcccagtgaaaaaacttggacaattcaaagtgttggcaagaacttagagccaggcacggtacctcatgcctggaattccagcactttggcaggccgaggcaggaggatcactggagctcaggagtttgagaacagcttgggcaacatagggagaccccatctaaaaaaaataaaatgagccaggcatggtagcacaggcttgtagtcccagctccttgggaagctgagacaggaggatcgcttgagcccaggaggtggagactgcagtgagctgtgattgcaccattgcactccagcctgggcctcagagtgagactatctcaagaaaaaacaaaaaccaataacaaaacaaaaacaaaacatagaggaaccgatgattatactgtgttggtatgatgaaaatcgccagactcccaataaaaaacatgacattatcaggtgaagctgagcatatatgtattttcttttctttctttccctccttttttttttttttttttgagacagagtcttgctctgtttccaggctagagtgcagtggcgtgatatcggctcactgcaacttccgcctcctggattcaagcaattctcctgcctcagcctcctgagtagctgggactacaggggtgtgccataatgcctggctatttttgtgtgtgtttttagtagagacagggtttcaccatgttggccaggatggtctcgatctcttgacctcatgatctgcccatctcagcctcccaaaatgctgggattacaggcatgaaccaccatgtctggccacatatatgtattttctgacccagccatccttactcatgtgtgccagcacacaagtctgaagtctgaggatggtcataaaaacttttttttgtaataaacctgagcttgaaacaacccaaaagtccatgacctggagaacagatgaatagccaatagaagattcatacaaaggaatactatgcagcagtaaaaaatgcaagccttacagccacatgcagcgatatggatgaatatcagcagaatcacattgagcaaacaaaacagattagcagtccaggtgctgtggctcacacctgtaatcccagcactttgggaggctgaggtgggtggatcacctgaggtcaggagtttgagaccagcctggccaacatggtgaaaccctgtctctactaaaaatacaaaaattatcactgcaacctccatggccaggcatagtggctcatgcctgtaatcccagcattttgggaggccgagatgggcagatcacctgaggtcaggagttcgagaccagcctgaccaacatggagaaaccccgtctctactaaaaattacaaaaaaattagctgggcatggtggcacatgcctgtaatcccagctactcaggaggctgaggcaggagaattgcttgaacctgggaggcggaggttgcggtgagctgagatcgtgccattgcactccagcttgggcaacaagagcaaaactctgtctcaaaaaaaaaaaaaaaaaaaaaaaaaaaaaaaaagccaggcaaggtgatgggcgcctgtaatcccagctactcgggaggctgaggtaggagaatcgcttgaacctgggaggcagagattgcagtgagcggagattgtgccactgcactccagcctgggtgacagagtgcagctctgtttcaaaaaacaaacaaacaaacagattagtaaagaatgtgaacaaagtcaaatgaggtggctcatgcctgtaatttcagcactttgggagtccaaggcaggcagattgtttgaaccccagagttcaagacaagcctgggcaacatagtgagaccctcatctctaattagccaggcatggaggtgcatgcctgttgttccaggtacttgggaggctgagacaggaggattgtctgagctcaggagctcacaccactgtactacagcctgggtgacacaatgagaccttgtctcaaaaaaatagaaacatgcaagaggtaaccatgtattgtttgctaaggagcatgtggtaaactataaggaaaaggaagaaaatgaaaaacaaaatttgtgatagttcttccatctgcagggaaggattatgagattggggagaggcacatgggggtcttttattgtgatggtatttttttttttttttgagacggagtctctctctgtcacccaggctggagtacagtggcccgatctcggctcactgcaagctccgcctcccggattcacgcctttctcctgcctcagcctcctgagtagctgggaatacaggcgcccgccaccacgcccggctaattttttgtatttttagtagagacgggttttaccgtgttagccaggatggtctcgatctcctgaccttgtgatcaccccgcctcagcctcccaaagtgctggtattataggcgtgagccaccgagcccggtcgatggtaattttttttatccaagcctgctcctcatagtttatctactcattgatgtttaataaaacatcaatgttttattgattatcaatgtttaataaaacatctactcattgatgtttaataaaaatttaagaccaggcatggtggctcatgagcctgtaatcccaacattttgggaggctgagacgggaggatcacttgagcccaggagtttgagacagcctgtgcgacatggtgaaactctgtctctacaaaaaatacaaaaattagctgtgctgatttttttaaaaatttaaagcagtgacagatacaaacatggttactattaggcattaagattacaactggggccaggcgcggtggctcattcgtgtaatcccagcattttgggaggccacggtgggtggatcacttgaggtcaggagtttgagaccagcctggccaacatggtgaaaccccatctctacaaaaaatacaaaaaaattagctggatgtggtggcgagcgcctgtaatcccagctactcaggaggctgaggcaggaagatcacttggaggttgaggttgcagtgaactgagatggtgccactgcactccagcctgggccacagattgagactacacctccaaaaaaaaaaaaattacaactggtttcacatgttaactcatgtaatacctccagcaaccttgtgaggcaggacttgttatcatattcattctacaggtgcggaaactgaggcacgaggaggtcacaagacctgcccaaggccatgcttgtgatgagagacagagtttggttttgaacaatggcctcactcaactccatgcacattctgcatttatgaagctctttcatgtgggctgggggcaggagaccctgtggggctcagcctttcatgctagtttaggtgccagtgatacagcgagcaggttgcagggcaaggggcccacatggagctgcccagtttgatatgtggggagggggccaggcgcagtggctcaggtctgaatcccagcactttgggaggccgagatgggcggatcccctgaggtcaagtgttcaagaccaggctggccaacatggtgaaacctcgtctctactaaaaataaaaaaaataaaataaaaaaaaaaagctgggcatggtggcatgcgcctgtagtcccagctactcggggaggctgaggcaggagaatctcttgatcccaggaggcagaggttgcagtgagccaagattgcgtcactgcattccagcctgggctgcagagggagactccatctaaaaaaaagaaaagtggggaggagtggcagagtttcgttcgggtcagggcccaatcagaggaagggataggggctgggggagtccagagaggagaaacaaaggctcagcttggggcagtcagggaagccttcctggaggagaggatattcagacaagacattgatggatgaaaaggagttcagagtgtgggcaaggacccatgggctggatggcttagagacatagagagagacctagacaggatgcagtagagctgcaaaaagactttacagagagaggctaagagacacatgactgagagagcagtggacagagtcagaggaacagagacccagggagagaaagagaccaggcagtagagttagagagacagagacgtagagacagaggaagagagatactcagagaacaggaccatctgcccggtgctggtgccgggcgtacacacaagagcttgcatttgcctgtacttgcttgagtattgcagggaggcgtttgcccaggttaccagggcaggaatgtccatgcatgggtggcgggggcacgtgcaccatttcagtgcaggtgagggtctgcacaggaggaaacctgcttgggggccgccgtcgccccttgtccccctgcaacgaggaggtgtggggcgaggcgccccttcccggagccaggccctttaacgcccccccagcccgcagcgcccccgccccatcaggcgtccctgggctccgcctgcccgccccgcatcagcgccacgtcaggcgctgtccgcgcccccggtgctgaaccaagatggccggtggcggccgggccccggcgtgagccaagcgcgggctgcagccgggagatgccccagcccagcggccgctgagcccgacccgacagagccggcccggccgcctccggcccacctgcgagctcggagacatgtctctgctttgcgttggaggtaggaggcgaggctgggggtcgggggacccgtgtggacgcgggctggggtcggggtccgcgtggatgcggctcccagggggttcctggggggtgacccgagtccaggtggctggacttttgagaggggtagcccttgtcgacgcagctgggccccggagggggtgatccgtgtagacgcggcagggctctcgggggtcctggtggccgctgctggaggggtcgtgtggacgcggctgaacgcggaggcccgtgtggacgtggacgggtatccggggttctacccggaaacgatctagactggggcgtctgtgtagaccaggtttttagagggtcagtgaggaagagtctgggctcggtagtttgattgaagcctgcaggggtgcttggaaggggtctggtgttgtgggctgggttacgggtcctcatggacgcggacccggctggaaattcgaaggagagtgcggtgggagggttctccaagccgtggggatgtaagatataggtagaggggcttggccatcagggcatccacgagttctaggactctcccagccctaggtgtaaagaggactggagtggggggagtgtggagacaggagacccctcccagcgtccagagagggctgtgactggaggtctgggggcgcttttccagttaactctttggcctcccgagtgagggggttggaggaatgtccagaaggtcttcccgctccctgccccctccggttctcccaaacacgtttcagggccttctcggcagggagcctacttcttggaagagcaatgtctcctggtccccctcctggcccatcctcacctcacccactttgcactggagagagggagggagggagacgtgaggtggggggggagctattttggggccagaacgccatctgcacagaggcccacgcccaggcccacgctctgcgttggggttggaggagggagggagacgtgggaggggcatgaccccccaccccacacctttatggctctggggtcgtggggaagccagcccaaccgaacccaggcgttctgggcactcccgtttgagaaatcaaactctgggagaccttgggcggcaggggtggatgtggaccgccgttccacgcctacagagctctgaacccctggttcttaaggactggggtccccccgtcactcccacccatttcaagaaggctggggtgggggaaggggtgtgtctgccaagcctgagactgcaggcttcgggagacctcgggcgacaggaagcgtgcgtgtgctgaactcctgctgcctggacacagggtgggcaggccggggagccgggaaccgcccccgccgcccctcctcctccctcccctccccctcggccgattcattcacaaaccctgccccgcccgcccgctccccgccgcggcagcttccgagtgcaaatccggccgggctgggccggcgtggacgcgggtgttcttaaagggacaggggcctactttctctaagctcgtttctgctggacggggctgggggtggtggaagaagggtccctagagtcaaaggtcaactcctccatcccctagcctccaggcctatggagttaggggagtagggaagtgaaggagacccctaggcgacccccaccgcctaggcctgaggacggaatgggaggagaacttgaatgtccagaccccctactgacctctccccctgctctaagtagccgggctcttaaaggtggcactggaggaggttccgacgtgggtgttcttggctgactcctctatcctctctcttctccccccagcatcccgccccaccccgcctcacatcctccaagttgggcttctctggaaggtttgcctagtggagtgggggggggggggggggggcggggatctcacccttaactctgacgcaaacaggaggctcggctgcgggggtggcattaagggggggcagcaggaggcaagagggatgaggcttccagaaacagagacgttgggggaggactgtgctggattctgtggactttacagggaggggcccggctgagtggagaggaatcgctgggaggggcaaggctggggaagaggttgacaggggtgggaggtaaggccctcaggtgtaaagggaggtgtgaggttggagtgaggaggagtaggaggcagggaggggtggggagagggagaagtgctgggtgaggccagtctcccagggagaggtgggatggtgcccagagaggggaggggctgggatggctgagcacgagagatgttggggtgggcttggcaggagtgaagctaggctgagatgggttgccgtgttgcctgagctcagctgaggaaatacctgtcccccctcccctccaccggggacccacaggcgtttgccaatccctacacacattcatacccagacttgttcctgtgtggacacaaatgcttaggatgtatgaaggctctacgcagaccatgtgcctgggaaggcacattccgtaggcacacgtgtgtactcaaatgcctgtgtgaacacaagcatacacgtgtatataggacacagtctgccgctacagatatagtcccagcaacacacgtgtgagtgtgtgtgtctgccagcacgcatatagatgtatccacgtgtctgatgaatgctcacaatatacatgtcacataaagatccacccatgtccagccgagcgcggtggctcaggcctgtaatctcatcactttgactttgggaggccaaggtgggcagatcacttgaggtcaggagttcaagaccagcctggccaacatggtgaaactttgtcactgctaaaaaataaaaaaaattagccaggtgtggtggcgcgcacctgtagtctcagctactcgggaggctgaggaaggagaatcacttgaataggggaggtggaggttgcagtgagctgagatcctgccactgtactccagcctgggcaacacagtgagactctgtctcaaaaaaaaagattcactcatgtcctaacactcagacatgtacccatacatatctgttaaggtccccaaccccatgaagcacatatatattcatataagcacatgtcaaagccatgtgtgtatgcacatgacaacacttgcctggacattcaaagcagcccctttcaacaagtggatgatgatgcatacaagtaaatacacatttgagtatttcattgcacacaagtgcatacatgtatgcagataaacaaatacagctgccacagaactgcatccatgtacacatgcaaacatcaatatgtgtgttttccacctaacatatcacccacaagctcacacacaccagtgtgtctctgatgtagtgacaccccactcctagacacacatgtgcagactcccacctgcacttaaatggtgcacatactctgcacacatgcacactcatatccatgtagaggcaggcacctgcctgccctggtaagatgagccaactactgctgcaaatacccaagcaagtacaggcaaatgcaagctcttgtgtatacacccagcaccaacacatagcagaccaccctgtatggtgtatgggccttatctctgcccgcttcatttatttattcatgtggtgccccgctgcttcccaacatcgtaatccactgactaggtcttggcaggatcctgaggctgtgaatggtaaatgccacctggttccttcatgaagtcacttattttatttatgcaacaagcattaattgagcacctactgtataccaggcactgttcctggctctgggacccagccctattcctagccatcactcctgcacgtcccatggggttagaatgaaagagatgagggagggctaagggagctgaggagtggggtatccagggctctcttcctctgggaagcctaccctgattccaccaccaccatttacttgagtctcagaagatgtgatgagggggagatgagcaggagggagatggtgctctgggtggagggaacagcatgagcaaaagcatggtggtgtgaagggttacttccagatcttcctatgtgcctcacagcattttgcacaggccacttgatgttttgttttgttttgagacagagtctcactcaaagcctgttactcaggctgcagtgcagtggcatgatctcagcttgctgcagccttgacctccagggctcaagtgatcctcctgcctcagcctcccaagtagctgggagtataggcatgcaccaccacacccggctgacttttttctttttaattttttgcagaagcagggttttgccctgctgcccaggctggtcttgaactcctgggctcaagtgattcaccctcctcagcctcccaaagtgctaggattacaggtgtgagccaccacgcccaactgatgttttaaaggctctataaacatgttatgaataaatgacatgaacaaatcagtgaatttaggtgagggtgggtttgcttcacaacttacaataatatcaacaacaaaccccatttatccagcttttttgtttgtttgtttgttttttgagacacggtctcactctgtcacccggactgcagtgtagtggtgtgatctcggttcactgaaacctccaccttccaagttcaagcgattttcctgcctcagcctcccgagtagctgggattacaggcacgtgctaccacacctagctagtttttgtatttttagtagagatggggtttctcatctctactaaaaatacaaatacatctctagtggccaggctggtcttgaactcctgacttcaagtgatcctcttgcctcggcctcccaatgtactgagattacaggctcgagccaccgtgcccagcccagcatttcataggcatgatgttaaggatttttatgcccatgccctctttaactcttacagtagccccattgtacagatgaggaaaactgaggctcagggagctttaacaacttgcctggtggaacagagccagaggtggagctgactgactctagagcctactggggttggcagaagtttgagccttctctcagaccccaggacctcggagacagccaagtcccttctgtggagtgatgttctgccctgggattgccttcttctttctatttatttatttattggagacagagtctggctctgttgcccaagctggagtgcagtggcacaatttcagttcactgtaacctcctcctcccgggttcaagcaattctcctgcctcagcctcctgagtagctgagattacagatgcacaccatcatgcccagctaattttttgtatttttagtggagatggggtttcaccatgctagccaggctggcctcgaactcctgaccaccaagtgatctacctgctttggcctcccaaagtgctgggattacaggcatgagccactgtgcccagccaggattgctttcttctctcatgcatctagtaaacagacatgtcacaatctctccattcatcggggctattcccctgctccttgcctaagaagccttcacacatccctccgttcctggctactcagtccctgataccctccagctaggaggagctgcatctaggtcttagctcctaccgttctcatgggatgccctccagagttgcatcttcagggctgcagcctaaccctttccctaacctggcctcacttttcttccacatacaatggacctcttctgcaaggtgccaataagggcatcctgggtccagcaggcctgagtgtgaattgctaagtccaccacttcctggcaagtctcacatcctctgcattccttggtgtgctcatctgtggaatgggcacaggagtagcatccaccatctacgtttgccagaactctctaatgaggcttgcagagcccctggcatgactcctggcctacgggaaggcccaataatcgtgagcaaaagacatgaaaaatcaatgatgggccggccccggtggctcacgcctgtaatcccagcactttgggaggcctaggcgggcagatctcctgagctcaggagttcaagaccaccctgggcaacatggtgaaaccctgtctttactaaaatacaaaaaaattagctgggtatggtggcgcgcgcctgtagtcccagctactcagggggctgaggcacgagaatcgcttaagccccgaaggcggaggttgcagtgagccgaggtcgcgccactgcactccagcttgggctacagagtgagactccgtcaaaaaaaaaaaaaaaaaaaaatcaatgatgatgtttttattaatggagactaaaagctttctggaaggcggttctgagtgcaggacatttctgagagtccactgcattctggggcccgaggagcgctccaagaggggtcccccagggccactccaggagggagcctagttcgttgagggtacacgggtgggaccgagcattcagcaccgtggacagcgcctgcccgcgcctctgggggacagctcttagctcagcctcccaggattaatggaggaggtgacgtcattccttccgtgaattactatttaatgagcacctactataggctaggcctacttctaagtggttcatggtaaacaacacacacacaaatcccttattcccgaagctctctggaactccaggttcttggtgttttttacactgaaggctcagtctggctctggtctatttgtgtcaacggaggataagggtcctcatttagtgtctcccagatgcgaaaccagcacagctgaggtcttttatcctaaagcccatccatctcccgctgaaatgccctccaccaacatcacacacaaaacgatcaaatctcctataatctatttctggattctctatgcttcctcccttcccccaagctaatcctggggcgggtgggctttcagaagccctagacggctggatctccacctcctgtctccccaccccatcccacgtggcaggtcagggagccagtgccccaagactgcagtcccccctaattagaatccagggtcagtcagccatgtggttcacgcctgtaattccaacactttgggaggccgaggggatggcttgagccttgaagccagccatagcaacatagcaagaccccatctctacaaaaaaaaaaaaaaaaaaaaaggaatagccaagcatggtgatgcgcacctgcagtctcagctactcgagaggctgagtggggaggatcgcttgaacctgggagatcgaggctgcagtgagccatgatcacaccactgccctccagcctggagcctgggcaacagagagagaccctgtcaaaaaaaaaaaaaaaaaaaaaaagaaaagaaaagaaaaaaaaagaagaagaagaagagaaaagaaagaaaaagaaaagaatccagggtattcaaatcctagaatccaggccagggacacctttagaacacaaccaaataataaaaacagtaaagatatcagtaataataataatagtataaatgacactataatcattctgcagaaggggtgagggaggaagaggagggaagaagaggaggagaaaggagagggaagggagatcagccactccgtctccccattttccagatgcagaaacggaggcgcgaagccaggctgcaggggtgtcccgcagcctgaactcctgcctcagcctccccgggtacggccactacattcatcagtcagcgcttctgggggccccaaagacctttgaggccgcatgacgcggtgtcttcacccgctcgtcgctggggacagcagtgggcacccccctcatccccgcccccctgtccgccggcgcgcctcccacgccctccgcgcgcccacgctataaatagcctcatgcgtgtgacccgaagcccgctggggaagggtggcgcttccgccccgctgaccctgatacagcaacccggcgcaggcggggaggtggcgggatgtgacgacgaagacggtgactcagggaccatttactgaccggggaagacagggagagagactgggttccttctctgagcccccttcctcctccaagcctctcccccgataccaccctcccctctgcgcccatcccccttcccgaatcccctccctcaccgcgaacacccttccctcctgagaaccccctcgccactctcggccccctttcctgtccccttttccctctgagacccctctcccactgggagccccagtgatgaaaaatcatggatgtcctcaacctggacctcggcagggagctaagtgcaggagcctggcttcagctatcagagggtacagccctccagccggtcccccactgcctgaggaccccaacggagaccattcccctctagccaagagaggctgcaggaaggagctgaggcttagggaagaggagccggactgaccaagggaggggcacaagaagggcagagacagtgagagagagaaggagagaacagagaccaaaagaagacgaccagagtggagagaaatagaacggggaggagggagatgagagacagggattgggaaagagagagagagaacagatcaaggagctactgggctccccgctgagcctaaatccatggtttataaaacagggcacagttggaggagcttcaagtgagcccagcccagtctagaccccagtgagccccttgtatcaccccccagagcctgtcactttcccacccccatatgcatccctacttttctcccccaactgcctctcctctccccagtgtctcctccacctgcctgccctccctagtggaaatctttccccctctctcttttattattattattattattatatattttttgagacagagtcttgctctgtcgcccaggctggagtgcaatggcgtgatcttggctcactgcaacctccgcctcctgggttcaagcgattctcctgcctcagcctcccgagtagctgggactacaggcgtgcaccatcatgcccggctaatttttgtatttttaatagagatggggttttaccatgttgcccaggctggtctcgaactcctgacctcatgtgatccacctgcctcggcctcaaagtgctgggattacagatgtgggctaccacgcccagcctctctcccttttaaattattatttttagacatgggatcttactacattgcccaggctggtcttgaactcctgggctcaagggatcctcctgccttagccttcctagtagctgggattacaggcatgtgcctctatgcctggtactctcgctgtctccttgtgtctctctatttctctccatctgtccagactctcctctcttgctttcatgcccatcatttcttcctctctcctctcccttcctctccctgtatgagtccctccagctgtgggtgcctttctcagcctctgtcagcatcccctccacccccgatcccgtcacattctacctcttgccccttcccctgcccacccccttcacagagagtccccacgcctgcaggctggacctcctccaggagccaggcccaaagctcctgctgggcacattcctgagtgttcctgagcctctttcagtcccaggggtgaggtgctgggtgggtgcgctccctgggggctgggtggggctgaggatgtgagcgaacaaaccagacctagaaaaaaaaaagacagagatggaagcagagatgaaggcccagagagaggggttcacttgcccagggtcacacagctcaggaatctgaacctggctcaaaccagcattcacttctctcaaggcccacccaagggctgcagtgcagtggcacaatctcagctcactgcaacctctgccttccaggttaaagggattctcctgcctcagcctcccgagtagctgggattagaggtgcgtgccaccacacccggctaatttttgttattttaggagagacgaggtttccccatgttgttcaggctggtctcgaactcctgacgtcaagtgatccacctgcctcggcctcccaaagtgctgggattacaggcatgagccaccgcgcctggccaggaacagtctttactgacatgtgtttagggccatcgcacttcccccgctcttcacgggaattctctcttcactggctccactcaggtgccttttgtgagacagaaattcaagcgatgaggacagagatacaaacccgggatgggaggctgtgacatctgcccatagaaacacaattctgtttctaggaatttatccttcaactcgctagtacacgctcttcaagacatactgaaaaaacatgaaggattagaacagtgggtgtcgaatgctaccatttgtcttggaaatcaagcaaaacgaacgtgggtatggttgccgacgcatggaccatctccagtggaacaaggaactgccaacgttgattgcatttgggagggagatgaagggctgggatggaaagagctttattctcagtgcctcatcttttggttgttttggattttacaacatgtgcatgcattgcctacacaaacaaagacactaatttgaaaaggaaaaggggagaagaaaagagggaggaaagaaaaggggccggtgtggcagctcacacctgtcatcccagcaccttgggaggccaaggcggatggatcacctgagatcaggagtttgagaccagcctggccgacatatactgaaaccctgtctctactaaaaaatacaaaaattagctgggcatggtggcgcacgcctgtagtcccagctacttgggaagctgaggcaggagaattgcttgaatctgggaggtagaagttgcggtgagctgagatggcaccactgcactccagcctgggcaatagagcaagactccgtccctaaaaaaaaaaagaaaaaaaaaaagaaaagaaagaaaggaaagggagggaagagctcagtgtgggagaagattgggggtgggagtagagaattaatggaggaaaaagatgtgggggacaaaagcaaggtgtgagaggtgttggcaatggaaactgaatacctgttgagaagagccaggagggggcgacatggctttgaatctcttggggctgtgagattatgtgaaatgtgagaagactggacctcagtggggtgcctgacatatattcaggttacacctcccacaagcaggtggggctggacaatctctgtcaaccctccagccaggacccaagtgtctccctgtacattacttttggttgttgttgagacaagaatctcactctgctgcccaggctggagtgcagtggcatgatcttggctcactgcaatctctgcctcctgggttcaagtgattctcctacctcagcctcccaagtagctgagactataggcgcctgccaccacacctggcaaatttttgtatttttagtagagacaaggattcaccatgttggccaggctggtcttgaactcctgacctcaggtgatccacctgcttcagccacctaaagtgctggggttataggtgtgagccaccgtgcctcgccctccacatgcattttgagagccagctctctgggttgctttgtcccaactcacccagccttctttgaggcttccccaaaccctgggagcatttgacattgcagactgagctggacaatcaagggagaggtcttgctgacctgtcggggctggtggagtcatcagagattgtctttatcctcgccttcttcttctccacctcctcaacttcccctcttcttctggggcaatcctggagggcttcttgtaggaggcctctcccaccatctgcccagctctttctttctaatcttgttcaattgtgggtaaaggcacagctagttgggagcttggggagtttgatggggacaggggatgcagggagagggaggggcagggaatgctctcagggtccaaatttccttccattctagggttgcctgtgctcatctgtctgatggcttctctctctccctctcatccctgcctcctctttcctacctctcctcctccccttgtctctgtctctgacattgcttctatctttcttttttaacatctgtctcttttgctttttatctttgcctgtctctcctctgtgtctctctccttatgtctccatcttggtgtgtctctgaatctctccgtatctctgcctcctcctccccacatctctccccacctcccttccctatctctgtctctctccacagtcaaaaaagccaagtttgatggtgcccaaggtaagtggcttctcttgctgtcctgtcccgtgttgtctgtctgtctgtctgtctcttggagagactgggagggggtcccagcccagacttagagttgggctttatgtcttctgagcatcaggagaggggtcagaagattaaatagggggaggggcagccattggcctggggtccctgcagtttgtatgggggtccccgggtctccccagccatccttggagagtctgtaaggggtggggcttgccctgagccagtggctcttcccagggtcctaagaggtagaatggggactcttagatggggctacaggtgggaaaaatgaggctcagagaggcgaaaggagtttctttcttttcttcttcttcttttttttttttttttgagacagagtctccttctgttgcccaggctggagtgcagtggcgtgatctcggctcactgcaacctctgcctctgggttcaagcaattctcctgcctcagcctcccaagtagctgggattacaggcgccctctaccacgcccggctaatttttttatttttagtagagatggggtttcgccatgttggccaggctggtctcaaacttctgaccttaaatgatccgcccgcctcggcctcccaaagtgctaggattgcaggcgtgagctaccgtgccctgcctttttattattattatttttatttaaaatttttattttttgaggctggagtgccgtggtgcaatcatgttttactacagcctcaacctcccaggctcaagcaatcctcccacctcagccttccaagtagctgggaccacaggcgtgcaccactgcacccagctaattatttttttgtattttttagtagagatagggttttgccaagttgcccaggctggtcttgaactgctgggctcaagcaatcctccccccttgacctcccaaagtgctggcattataggcgcgagccactgcacccagcctgcaaagggggtttcttacagtcaattttgttccccttttctgggacctcagtctttttagctgaaaaccaatggcatggtcatttcgaagcagctggatgaagtatcccaaaattccacgtctccccacactgaggcccctcccttgtgccctgagggtggggttgtgggttagggggtgagtggcccagaaattcctgaggggatcacagcagatggtctagagcttgggaaggggcattggagagtccctgagccccagcgctgacccctactctcactgccacagagaaattcaacacgtacgtgaccctgaaagtgcagaatgtcaagagcacgaccatcgcggtgcggggcagccagcccagctgggagcaggatttcatgttgtgagtctgcagcgtctggcatgacctcactccctggcatagcccagcacctcgctggcccctcagggcagagctggacactggggaatcccgggtgactcccctctgtcctccctcttcccctgtccaccttatcaccttcacctccaaaacacatccccaatccaatcacttcccttggtctccgcagccaccagccaagtccctgctgcccgccagcctccgccctggcctcctgtgccatccacctcctacaatctgttctcctccaggcagccagggggatatttttaaaactgcaaatcacatcctgtcgctcccatgttccaaacttgtccgtggctcatcgacctcacaataaaacccacagccttccccgtgattcccaccaggttctcgctctatctccctcacctgccccagccacacccacctctgcccctttctccaacacttcccagcttgttcttgccccagggcccttgcacttgctctcctgtccccagctggctcttctccttcaggtctcagcttgtgtcacctcctcagtgaagccctccctgaccactacctccaagctacaatttcagggcatcatgccttcccaggccttgccaccaattttgtttgtttgtttgtttgttttgaggcagagcctcactctgttgcccaggctggagtacagtggcataatctcggctcacttcaacctccacctcccaggttcaagtgatcctcctgcctcagcctcccaactagctgggattacaagcgtgtgccaccacacccggctaatttttgtgttttaagtagagatggtgtttcactatggtggccaggctagtctcaaactcctggactcaggtgatccgcccacctcagcctcccaaggtgctgggattatagatgtgagccaccatgcctggccaatggaatttttttccttttttttttgttttgttttgagacagagcctcactctgtggcccaggctggagtgtagtggtgcaatctcggctcactgcaacctctgcctcctgggttcaagctattctcctgccttagcctcccgagtagctgggactacatgtgcgtgccaccatgcccggctaatttttgtgtatttagtaaagaccgggtttcaccatgttggccaggctggtcttgaacttttaacctcaggtgatccacccgcctcggcctcccaaagtgctgggattataggcatgagccaggagccaccaatcccagccaacagatatatatatcagatatatatatacttttttttttttttttgagactgagttttgcttttgttgcccaggctggagtgcaatggcgtgatctcggctcaccgcaacctccgcctcctgggttcaagcaattctcctgcctcagcctcccgagtagctggaattacagacatgcaccaccacgcccggctaattttgtatttttagtggagatggggtttctccatgttggtcaggctggtcttaaattcccaacctcaggtgatccgcccatctcggcctcccaaagtgctgggattacaggcgtgagccaccgtggttggccatattttaaaaatatatttcttaagataaatctttggtaaactgtaaattcagtgaatctcacatttcaccaagtttcctgctcccccgaattcacatatgtctagggcgaggcctgcagggaaagtgctttgaggtgggatcgtgtcctcacatcattagatggggatgacactgggaaggacagaggtgacccgaatgtccttatcctgtaggtaaagggagctatggagggtatttgagcctcttcctcacttacccagcatggtcagtgttggagggcccaaggaagggctcagaaagatgaaggtgcaggcgatgtgtaacatctgtccccacgccatccttcccggctttgaatcctggttcttttgtgataccccgagctcttaacttcccccactggcctcagtttcccctctataaaatgagaaccaccatgttaccctaccacctaggacactcccaggcctaggtttgaattgcagtatgctgtgtgttctcaggcgaatcaactaaactccctgggcccccgtttcctccctcctgctccctcgacgccccctctcctttttctgcagcgagattaaccgtctggatttgggactgacggtggaggtgtggaataagggtctcatctgggacacaatggtgggcactgtgtggatcccactgaggaccatccgccagtccaatgaggtgagtggcgggtggcctgagggtgaagaaggaggagtgccttgcagaagcccagagaccagtggactaaacaagatgggcatttatctcctatcccctgacaacatcaatgtagacacttgggattgccacgaaccttccaaagtcactagagcctatacaccttccatcttgctctgcctctctctccatgtggcttccaccttgtggccccaaatggctgctttaggctcaccattgcatcttcattccaaccaccgaaaggtgctggtggtgggggaggggggtggttcatgcacatctcattggccagaacttagacatgtggccaacaccttgctgcaagggattctgggaaatgtagtcctaggctggaaaatgtagtcctgggctgtgcttccctaggcacagctaaaaatgtattaccttggaaggagaaaagggataatataggcaattagcattttgtgtcccagatgggcagcagcaggaagcttacaccaactcataagaaggtgctaggtaacaaccctggcccctcagcctgtgcatcattgtcagcaggtagtagtgatgtctattttttatttaattatttatttttgagacagggtctcactctgttgcccaggctggagtgcattggcatgatcatggcccactgcagcctcgacttcccaggctcaagtgatcctcccacctcagcctcctgagtagctgggactgcaggtgcatgccaccaggccccccttattttttttgtatttttaatagagacagggttttgccatgttgcccaggctggtttcgaactcctgggctcaagcaatccacccacctcagcctcccaaagtgctggtattacaggtgcgagccaccatgccaggccgtggtcatgtctattcatctgtccccacagcccaatccctggcctcctaacctcaagtctcaacctctccatgctgaccccaggaaggccttattagctggagctctgatctgtcctcccctgtccatctgccttgggaggcccttcagatggcacctgcccactagcctcatctccccccacactctaacctctacccctcccagattccaccctctgaacctttgcatagtgtgttccctgagcttcaagtgtcctcctttccatcaccttctaaattcccatgtgcccacctccaggaagccctctctgacttctctctagatcctttagccctccttcctccctctgggctatgacctcatggggctgggggtgcctgtgtccagccctgtttccaagggctatgggctctcaggagccagggtgatgatggctgggcctcttggggaccctggcatcacccaatatgaaccaggcatagaggagggactggggactgttttttgtttgttcgtttttgtcattttattttattttattttattttattttattttattttattttattttattttactgtgagatggagtctcactctgtcacccaggctggagtgcaatggcacaatcttggctcactgcaacctctgcctccctggcttaagtgattctcctgcctcaacctcctgagtagctgggattacaggggcctgccaccacacccaactaatttttgcatttttagtagagatggggtttcgccatgttggccaggctggtcttgaactcctgacctcaagtgatccgcccaccttggcctcgcaaagtgctgggattacaggtgtgagtcaccgcacctggccagtgagtgtttgtttttgaatgaatgaatgcagagggacgaaatggttgcaacaatctaggtaagcgagtctaaaaggaagccttggctgggcatggtggctcacacctgtaatcccagcactttgggaggctgaggcaggtggattgcctgagctcagcagaccagcctgggcaacatggtgaaaccccgtctctactcaaaaatacaaaaaattagccaggagtgctggcacgtacctgtaatcccagcagctcaggaggctgagttaggagaatcacttgagcctgggaagcggaggttgcagtgagctgagatcacgccactgcactccagcctgggtgatagagagactctgtctcaaaaaaattaaattaggccgggcatggtggctcatgcctgtaatcccagcactttgggaggccgagatgggtggatcacgaggtcaggagattgagaccatcctggctaacacggtgaaaccccgtctctactaaatatacaaaaaatcagccaggcgtggtggcgggtgcctgtagtcccagctactcgggaagctgaggcaggagaatggcgtgaacccaggaggcagagcttgcagtgagccgagatcgcgccactgcactccagcctgggcgacagagcgagactctgtctcaaaaaaaaaaaaaaaagaaaagaaaagaaaaaagagagagaaaggaaggaaggaaaagaaaggaataaaggaaggaagggaggaagggaaagaaagaaaggaaggaagcagggagggagggagggaaggaaggaagggaaggaaggaaggacggaaggaaagatagagaggggacatgactttggttttggggtaggggtgagggggatgtctcatgcgagagtaggggccctggggactagtgaccagcagattcctgacccacacacctcctcccccaacccccaggagggccctggagagtggctgacgctggactcccaggtcatcatggcagacagtgagatctgtggcaccaaggaccccaccttccaccgcatcctcctggacacgcgctttgagctacccttaggtgagtacaggggcccgggaccttcacccagccccagccccagttgtggactcactcagctattccaggagagtgaacaggcctgggtaggtctagctgacccttcaggctgagaatgagggtccttcgccccggaggagagagagtttcttgggttgcagagaacagggatgtgaacctgctgggtgcgggccatgacctgggccccgtagcttcccagtgagctgcaagtgcttcacgaccgagggcgttcagggttgagctatcctggctgttccttggtgatgcctgagactgcaacagtgaactggggataggaggagagacagacagagacagagagacaaagagagacagagagagacatgtagacagaggctgagaacagatagtcccctcttcctttcctggaagcaccttgagtctctccacctcattcttctaagaacccatggctggccaggcatagcttctcatgtctgtaatcccagcactttgggaggccaaggggggaggatcatttgaggccaggagtttgagaccagcctgggccatctagtgagatcccatctctatgaaaaagttaaaaattcaccaggcatggtgctgggtttctgtagtcccaactatttgggaggctgaggcaagaggatggctcaagcccaggagtttgaggcttcagtgagttgtgattgtgccactgcactccagcctgggtgacagagcgagaccctgtctctaaaaaaataaaaataaaaacaatgggctgggcgtggtggctcatgcctataatcccagcactttgagaggccgaggcagatggatcacctgatgtcaggagtttgagagcagcctggccaacatggagaaaccctgtctctactcaaaatacaaaaaaattaactgggcatggtggtgcacacctgtaatcccagctactcgggaggctgaggcaggagaatcgcttgaacccaggaggtggaggttgcagtgaactgagattgtaccacttcactccagcctgggcaacagagtgagactccgtctcaaaaaacaatttaaaaattaaaaaattaaataaaaacaatggcttccccaccctcgtaaaggctaggaaccatctcctgtcatcctccaactattctccattcagctctgggaagaggggcgtcagaggcaccacggtacctccccttcatctccatccaccctcctgagaccgcagaccaacccacccctacttctgaggctttgccaaagaccccagaagccagggcccgggtggagctcagtaggcctggaggatggaggctgagcggcagggagggtcttccaggctcacagacagggctctgcttgcagacattcctgaagaggaggctcgctactgggccaagaagctggagcagctcaatgctatgcgggaccaggatgaagtgagtgttggggtgggaggggactgtttcttccttgtttctgtctctgtctccccatgattttcacttacagatgctgtttctctctaagcttgtctttccctgcatctctgtttctaactctttgtaacctgactgcatccatgacccatgtggtccagtctctagacaatgatggggtcaagaaacacacagaggccaggcgcagtggctcacgcctgtaatcccagcactttgagaggcgaaggtgggcagatcacctgaggtcaggagttcaagaccagcctggtcaacacagtgaaaccccgtctctactaaaaaaaaaaaaaaaaaaaaaaaattagccaggcttagtggctcacacctgtaatcccagcaatttgggaggctgtggcgggcagattatttgaggccaggagttcgagaccagcctggccaacacggtgaaaccccgtctctactaaaagtacaaaaaattagctaggcatggtggcgggcgcctgtcattccagctccttgggaggctgaggtgggagaatcacttgaatctgggaggcagaagttgcagtgagccgagatcacgctgctgcactccagcctgggcaacagagcaaggctctgtctcaaaataataatattgataataataataaaataaaaaattttacttttcatttggcggatacatgtgcaggtttgttacacgaatatattgcatgatgctaaggtctggaattccatggcattactcaaattgtaaacacagtacctaacgggtagttttttcactcttgtcctgctccctccttcctcccttctggagtccccaatgtctactgttcccatctttttttttttttcttttttgagacggagtctcgctgtgtcaccaggctggagtgcagtggcacgatcttggctcactgcaacctccacctcccgggttcaagtgattctcctgcctcggcctcccgggtaactgggactacaggcatgcgccaccatacctggctaatttttgtatttttagtagagacggggtttcaccgtttagctaggatggtctcgatctcttgacctcgtgatctgcccgcttcggcctcccaaagtgctgggattacaggtgtgagtcactgcacctggcccctagtcttttttctatctctgtttcttactttttctgtctctgtctctgtctctgtctttctctctctctctctctctctctctctctcgtgtgtgtgtgtgtctttctctccttttctctcttactccctgtatccttctcatagagagggagagaatttgggaggtagagggaagtcgggatgggacagaacagaggactatcctggtcccctggcctttggcccctctgagagaagccctttctccttcctccaccccttcagtattcgttccaagatgagcaagacaagcctctgcctgtccccagcaaccagtgctgtaagtacctcttgattcttccttgggtatcagctgaaatcctcatccctcccctaccccatgactgtcctgtctaaaggctcctccagtccggagatacaagtcctgagagtgcagtgtccacttacagtgtattagaaatcagcgttctgaggctgggcatggtggctcacccctgtaatcccagcactttgggaagccgaggtcaggagttcgagaccagcctggccaacagggcaaaaccccatctctactataaatacaaaaaaaatgaacaggcatggtggtgggtgcctgtaatcccagctactcagaaggctgaggcaggagaattgcttgaacccaggaggcagaatctgcagtgggccaagatcatgccactgtactccagcctgggtgacagagcaagactctgactcaaaaaaagaaggaaggaaagaaagagaaagaaagagagaaagagagagagagaaagaaagaaaggaaggaaggagaggagaggaaagaaagaaagaaaaagaaagaaaagaaaagagaaaagaaaagaaaggaagggaaggaaagaaaggaaaggaaggaaaggaaagagaagagttctgagacttgggcttgatgaaagacaagaaggaagaaaggaaggaaggaaggagagttctgagacttgggcttgattcccaccttgctatgtggtcatgggcaggccagtgtccctcttcgatatttaggggccctctctttgaaatagcgcatctgacagccccctcactctgagggctgttggaaggatctgggacatctagagacatgaaaaacacttcgtagatgcttcacttccattcatcagatcctggatgagggcgtataactcattccacaaactattcatggggccagcacaaaccccgagcagcccacgtcagatggtgcagacagacacaggcagaagatcctgccagcacatgtacaatgggcgcacgtacaacagacgaaggctgtttcactaacccattttcttagatggagaaactgaggcccaagaggagatgtgatttacccaaggccacacacccggcaactggcagagccaggatttgaacccaggtctgagggactccaactttgcttccctttccactgcaccttgtctgttaatgatgatgatgatcacgttcctcttcctatttccatcaaggctgcagttgtcaagattttttatcttcctgggccttgtggacactcagatgcatccagaccaggtcttttcatggatggaggagctgtctccctccttaaaatgacttcccattgctctgtggtggaggggaagtagcaaatcatatagcctcagggcagagctcccacctgctgacaccaaaaccccactgcactctttagcctccttctcctttcccatttactttcttttcttcttctctttttttttttcttggagatagagtctccctctgtcacccagactggactgcaatagtactatcttggctcactgcagcctctgcctcccggatttgagtgattcttgtgcctcagcctcttgagcagtggggattacaggcacatgccaccacgcccagctaatttttgtatttttagtagagatggggttttgccatgttggccaggctggtctcaaattttttacctcatgtgatctgcccacctcagcttcccaaagtgctgggattacaggtgtgagccaccatgcctggcaccttttccatttgcttttccatcttccttttctcccctctcacagctctccctgtatctgtgtctccctcaccatgtgtccaggagggtggtaatggaaccggggttgaggagggcttgggatactccagctggggtaccctgtttccacactaacttggggagtgatattgagaaagttccttggcttccctggccagggaggggtcatcactgcctggaaggaattacaaacccccgcttggtgaatggggtcattgagaggttgcaatgggggcggggccaggcagagtggaggcaggaaggcaatggcagagagcccctgggcagatggactagagctaggggcaggttcattttgggaagtggagaccaccactcagtatttacccacaagtcctcccttggagtattttgtcaccctatttctcagagaaagcagccaatggtcagaggagccaggattctggtccaggacatttttctgaagtgccaggtactgcacgtgataggcaaaggtggttctcgccctggccctgatgcgcagaggctctgtgactttgggctgctcactccatccctctgagccccatagtttcacccataaaatgagtagaatgataaaatccacccaacaggggtgtttcaaaccttagggtttccaatttagtgtgtctttccttatccaagagctgggagaggaaaagggtggagactgggagactgctaaccctagacatcatagtcagaaaaccctgggcccaaatacccactttgttacttcctgactgagcctttcctctcattgaaaactgagccaggcacagtggctcatgcctgtaaatcccagctactcggcctcacttgagaccacgtgtttgagaccagcctgaccaacatagcaagatccatctccacacaaaaaaacaaaaagaaaaccaccaagaaccaaaacattagctgaacatggtggtgtgtgcctgtaatctcagttactcaggaggctgaggtgggaggatcacttgagcttggaaattggaggctgcagtaagccgtgattgcaccactctactccaggctggatgacagagtgagaccgtgtttcaaaaaaaaaattaaagaaaagaaaaaaataaacaaacagggatatcccaccttcctcccaaggtggagagcagagacacagcaagtgtcagcaatgaaggtgatactcagggaaggtactcaggacaagagggacttttggggtggggggagcagttggggagagtgaggacagcaggggagcccccttcctacacccacccctctgtctgctcccttttattatttctgccccttctctttgtaggcaactggaattattttggctggggtgagcagcacagtaagtactcagcctgattgatgttctgggagttacatgggaaggtgggcaccttggtgatcccaaggcccctccccactaccacacagggaagcaaggagcctgtgacgagcacgtgggggccagagggctcagcaagacccctttcaagctttcctgtaccctgttcattagtgcctgtcttgggaggcctgccatctgctggggagtgggcaccgtcattggggtggggtggggggggttagcctggaggagtggacatttagaccaacaacctgcttgtctccagctgggcactgtgacccccgcaccccactccgccgtataacctcacctcctctcctgtagcccctgccttttggtcttcctatcttccttctccacttggaaatgtgtccagtgtcactcagagggtagtgggtgggcggggtctctaacagaacggcaggccagggacctcagggagatgcacacagggacctcagcaccccccaggtccacccacactcacacctcaccttccaccttcatttgctctcccagggaataaggcaagccaccccctccctaaattaaatgtccattttccttttcctttttttttttttttttgagacggagtctcactctatcacccaggctggagggcagtggcacgatctcagctcaccgcaagctctgcctccagggttcacgccattctcctgcctcagcctcccgagtagctgggactaaaggcgtccgccaacacgcccggctaattttttgtatttttagtagagacggggtttcaccgtgttagccaggagggtctcgatctcctgacctcgtgatccacctgccttggcctcccaaagtgctgggattacaggcatgagccatggcacctggccctaattaaatgtccgtttttctacctaacagcggttcccaacctttttgacacaagggaccagtttcatggaagacaatttttttatggactggggttgggggatggtttctggatgattcaagttcactgcatttgttgtgcactttatttttattattattattattacattatagtatgtaatgaaataatgatacaactcatcatcatgtagaagcagtgggagccctgaacttgttttcctgcaattagacagtcccatcttagggtgatgggggacagtgacagatcatcaggcattagattctcataaggagcacacaacctagatcccgcacatgcacagttcacagtagggttcacgctcccgtgagaatctttttttttttttgaaacagagtcttgctctgttgcccaggctggatggagtacagtggcgcaatctcgcctcactgcaacctctgcctccgagttcaagtgattctcgtacctgagcctcccaagtagctgggattacaggcgcgtgccaccatgcccagctaattttttgtatttttagtagagatggggtttcaccatgttggccaggctggttgtgaactcctgacttcaggtgatccacctgccttggcctcccaaagggctgggattacaagtttgagccactgcgcccggccttctatgagaatctaatgctgccgctgatctgacaggaggtggaactcaggcggtaatgtgagtgatggggagcaactgtaaatacagatgaaacttcactcgctcacccaaccgctgcccacctcctgctgtgcgccccagctcctaacaggccacagaccagatccatgccctaaagagttgctccctttctcccataccccgcctcttctagagaaatccagtcctctattctttctttccttctttcttttttcttttttttgagatggagtcttgctctgtcacccagactggagtatagtggtgcgatcactgctcactgcaacctccacctcccgggttcaagcagttctcttgcctcagcctcccgagtagttgggattacaggtgcacgccactatgcctggttaatttttgtatttttagtagagatggggtttcaccatgttggccaggctggtcttgaactcctgacctcaagcaatcctcccgccttggcctcccaaagtgctgggattataggtgtgagctaccatgcctggccagtcctctattttgaggataaatctgcctccttctctctccttcaactggggagtccttcactccttcctcatatcctggtggacaaacctaactccaggaccagtgaaactgttgacaaacactttggtccaccacaatttatcaaaaacaagttggttaaaaatcaacttaggccagccacactggctcacacctgtaattccaacactttgggaggctgaggcgggagggacgcttgagctccaaagtctgaaatcagcctgggcaacagagcaagactccatctctacaaaaaaaaaaaaaaagggccgggtgtggtggcacgcccctgtagtcccagctatttgggaggctgaggtgggagggttgtttgagcccaggaggttgggactgcagtgagccatgattgtgctactagactttagcctaggcaacagtgtgagaccctgtctctaaaaaataaatagattaaaataaataaataaaatcaattttgccaaaatgaatgcttggcagacagggcaagctcgataacaaccaacttgccacaaacgaacagtacggtcaaaagcaaagatagaccaggcgtggcagctcacaccataatcccagcactttgggaggccgaggtaggcagatcacttgaggtcaggagttcgagaccagcctggccaacgtgacgaaaccccatctctactaaaaatacaaaaattagccaggcatggtggtgcatgcctttaatcccagctactcgggaggctgaggcaggagaatcatttgaacctgggaggtggaggctgcagtgagccgagatcgtaccattgcactccagcctgggtgacagagcgagactctgtctcaaaaaaaaaaaaaacccaaaaaccaacaaacaaacaaaacaaaacaccaatgcagctaaagctgatagataattgggtcaaaaaggaaagacaattgaaccgaaaacagaccgttgggttaaaacaaaagtggttgaaaatagccagaagcaggcaatttagtcaagagctacttagtagaaagcagagcctgggcaaaagcaaaaagaatccaactcaaagtaatttacccttcataagcagataatttgtcaggaaaaaaaaaaactgggtaaacatgtgcacagcctcatgcaatttggctggaaacatctcagcccggtcaaggacaattggatagaaagaatgctggccggccgaggtggctcacggctaatcccagcactgtgggaagctgaggcgggaggatcgcttgagcccaggagttcaagatcagcctgggcaatatagggagatcccatctctacaaaataataaataaataaaattagctgggtgtggtggtgtgtgcctgtggtcccagctactgtggaggctgagatgcgaggatctcttgagcccaggaggtcgaggtttcagtgagttttgatcgcgccactgcgctccagcccaagtgagagagaccctgtctaaatgaatggatgaatacagcaaaagtctgaaggtttcactcattgctctgagattttggggtctgggggttttttcatttttttacatcctcttccccttacccgtacttctcatgttttcttcatggactactttttctttttttctggatacagggtctcattctgacacccagactgcagtgcagaggcgtaatcatagctcactgctacctcgacctcctgggctccagcaatgctcctgccataccctcccgaatagctgggactacaggcgcccaccaccacgcccagctaatttttaaatttttttaaagagatggggccttactatgttgcccaggctgatcttgaactcctgggctcaagtgatcctcctgccttggcctcccaaagtgctgggattacaggcatgagccactttgcctggcccatggactaggttttactttacttttattttattttattttttggagacagggtcttgtgtcacccagcccctggagtgcagaggtgtgatcttggctcacagcaatctccacctcctgggttccagagattctcctgcctcagcctcccaaggagctgggattacaggcacatgccaccacacctggctaatttttgtatttttagtagagacagggtcttggtatgttgcccaggctggtcttgaactcctggcctcaagtaatctgcccgcctccgcctcccaaagtgctgggattacaggtgtgagccactgtgcccggcctttgctttacttttaaaataaagataactttatcattctttttagttaaaaaattaaaaagattgcattattgaaatcttttttttcagaaggtacagaaaagaataaagaagaaaatgtacaatccccaattatgccaccacccagacatgttgcttttagaattggaatttttttttttaggatttagaaaacaaactgttcttttttctaaggaaaccaaactaaaccaaaatatcttttagttcttattaaacatgaagtttggcaactctaccacattccattttagcaatagattccaagtgtgtggtggctttgccaagctaagaatctaatcctttttgaaaaagacagaaccatgtctcagcatcttcttggttcttgcatatttgttaagttcaggtctggggtcgtcaccctcagatatcaggaaatctctaagggttaaagagcgttccgtccactttgaactcctgatcttcttccaacttccccctgactgtctgtgtgactcctgttatgggaaactaactgctcagtggaaaaaaatcccatgtcattttcagagatcctgaccttcagcaaagttgttcttcacatttgagctgaaggatgccctctactctgtccctgttttcttcacattgtaggtcctaccctagcccctagactttaggtccaatttgacccacataaagcaaagcagggttttcacctcccttgttctgaagcctatatctctattaacatgacccacaattctttatccatactagtaaaaaattctcttcttcggtagcggcaccgtaagtctgggaaattgtattggctcccatcatgtgcactctctcttcctcaccctcttcccataccgcctctctcttccagacgatgaccccgacagtgcagtggatgatcgtgacagtgactaccgcagtgaaacgagcaacagcatcccgccgccctattatactacgtcacaacccaacgcctcagtccaccaatattctgttcgcccaccacccctgggctcccgggagtcctacagtgactccatgcacagttacgaggagttctctgagccacaagccctcaggtaggtgctgcggagtgcagcatgcatgtgggtcctgctgtgtctcctggagtggagagaggggtacggggctggacagagctggaggtggagttccagaagggcagaattcacccatccaggagggcagaattcacattttcttgtgggaattaaccatttttttctttttttttttcttttcttttttttttagacagagtcttgctctgtcacccaggctggagtgcagtggcaccatttcggctcactgcaacctccaccacccagactcaagcgattctcctgcctcagcctccccagtagctgggactacaggcacaggccgccacaccaagctaatttatttttattttttgtggagatgggggtcttgctccattgcctgggctagtcttgaacccctttttattcctatagcatcctcgaggctggccagggaagagggtctcaggcgctaagattggaggaggtatctaatcgggaaatgataaggttcgttgaatgactaagtgaatggttagaagagggctgagtggtggcccctatgtccccctgcctgtatttagacagagacagatattgctgttgacgttgagcacgatcctgggttcacataagcagcacataacagagggcctgacctggccagacagtggggggcatttgcacaagtaagtgatgtttcagtgggtaccagagggtgggtaggagtttgctagataaagcagacaaggaagagaccacggcaagtgcacaggtttatggtgttggagagacaacgaggtggccagcgtggccggaatggaggaggcggggagaagtggagggaggtatgcagggggagtttggagcgtatgggccacacagggctagcacagattttattccaaggcactagggagccatggtaggatttagagcaggggagggaggtgattggatttacaattccctgtggcttccaagggaagcaggaactgtggagacagcatctggtagagacagcagaggctggcctgggttggggcccggggtacggggaagtggatgcatttcccatactttttccaggtggaggacaggagacctgctgcggggctgtggtgatggcgctgaccctgagttcccagcacagtcaattgcctgttccccacagaccgcaaatgccacaaaagtgggaatttttttttttttttttttttttttgagacggaatttcgctcttgttgcccaggctggagtgcaatggcatgatcccagctcactgcaacctccacctcccgggttcaagtgattcttctacctcagcctcccgagtagctgggattacaggcatacgccaccatgcgcagctaatttttgtatttttggtagagacagggtttcaccatgttggccaggctggtcttgaactcctgacctcaggtgatctgcccacctcagcctcccaaagtgctgggattacaggcgtgagccaccgcacctggccaaaagcggggatttttgtcttttctgatcatggctgtgttttccagcccctagagcaggacctggcacatcgtaggtgctcagtcggtgatgagtcaatgcctgtgtgactggggctcaggtgggcagtgactcggtaccccagtccctgaaccctgttccatccccacagccccacgggtagcagccgctatgcctcttccggggagctgagccagggaagctctcagctgagcgaggacttcgaccctgacgagcacagcctgcagggctccgacatggaggatgagcgggaccgggactcctaccactcctgccacagctcggtcagctaccacaaagactcgcctcgctgggaccaggatgaggaagagctggaggaggacctggaggacttcctggaggaggaggagctgcctgaagatgaggaggagctggaggaggaggaggaggaggtgcctgacgatttgggcagctatgcccagcgtgaagacgtagctgtggctgagcccaaagacttcaaacgcatcagcctcccgccagctgccccagggaaggaggacaaggccccagtggcacccaccgaggcccccgacatggccaaggtggcccccaagccagccacgcccgacaaggtgcctgcagctgagcagatccctgaggctgagccacccaaggacgaggagaggtaacaggacggggccaaggggccagaggggctgccacaaggtcacagggtcagcagggctatgatggggtcagcgtggacctgggaagttgctggggctgaagttgtcacaggctcttgggtttcttaaagggatcagaggtgacagggcagagtagggaggtcaaagagggttcaaggggccgtgaaggagacttagagtttgtgatcttagtggttgctggggtcggagaggtcaagatcctgggcaaatggggggccagaggggctgggctggtgaaaaggaagccgaggaacagtgaagtgtcacagaagcattgggtgtgtgggaaggggtgaggggcactgaggtgggccaggggactcacgtgggtcctaatgtctctgaggggtcagagataccatggggagctatgcatcacttgcacagctggagggtcaagggaagttcaggggtcacggagagccagcccagagcctcatagcgttccctgcctcagtttcaggccgagagaggatgaggaaggccaggaggggcaggactccatgtccagggccaaggccaactggctgcgtgccttcaacaaggtgcggatgcagctgcaggaggtgagtgacacgcccagccatgcccctgccacacttagccaggccacgcccaatggcaggcccacacatgttttggccacacccacacctatattggccacgcccaacaccccacccgtacccaagcctagcctgggcatgcccagtgcagtgcccacactgtgcccatgccccagccactcgagcccttccctggccccaccctcattcagcctggcctcacccaatgtcaccgatgccccacccactctgacccttccttagccacatacacacacagcccagggtatccccatggcccgtccacaccagcctggctatgctaactcccaaaccatgcaccaagtctggccccacacatccccagcccagcctccttcccaatgtcagcctggggtttctagatctagagggaggagagaaaactagggctgaaactgggctgaagtcatggttagggatcaaggtcagggttagttcagccatcaaagatcagaggtcagggttagaattggtgttaggcaaaggggtcagtgcttagggccaaattggaggtcattgtcagggttagggaaaggtctggggccggctcagtaggggagtaggaatcaagggaagcaatcagcatcaggggcaagctgactgtttagatgggcagcagggttgaggccattcgtttattccttcattcagctcaccctgggctggggacagctgtgttgctcttcagagttaccctccaaactgcagtgggattggcaggaggagattctaaacagactcccaaaggtttagaccatcaaatatcagagccacaaaattaccaaacgaaatttcttaacagttttaaaatagaaatctattttttgactcagcagtacatacatatggttctaaatgagacaggtggaagaggacacagtgaaaaggctgttggataacttccactaggtcaagaaattaaattgaaaaaatagcagctactattggaactatgtgatatacaagaaaaacaaactatggaactagtaatatgacaagaaaaagacacatggaaggctctctgggtttcataggaaaagcataaaactaatccaaggcaatcaggaaaactccctggaggagatgacacttaaggagaagtgatggccgggcgtggttgctcaagcctgtaatcccagcactttgggaggccgaggtgggtggatcacgaggtcaggagatcgagaccatcctggctaacatggtgaaaccccgtctctagtgaaagtacaaaaaaattagccggctgtggttgcaggcgcctgtagtcccagctactcgggaggctgaggcaggagaatggcgtgaacccgggaagcggagctggcagtgagccgagatcgcgccactgcacaccagcctgggtgacagagcgagactccatttcaaaaaaaaaaaaaaaaaaaaaaagagaagtgatatccaaaatatttatttcaacaatatttcaggagctcatgcctgtaatcccagcaatttgggaggtcgaggcgggaggctcacttgcactcaggagtttgagaccagcctgggcaacgtagtgagacctcatctctaaaagaaaaaaataaaaaatatttcagagccggatgcagtggctcacgcctgtaatcccagcactttgggaggcagaggtgggtggatcacctgaggtcaggagttcgagaccagcctggccaacatagtgaaaccccacctctactaaaaatacaaaaaattaattgggtgtggtggtgggcacctgtaatcccagctactaggaaggctgaggcaggagaatcgcttgaacccaggaggtggaggttgcagtgagctgagattgcgccactgcactccagcctgggcaacaaaagggaaactccgtctcaaacaaacaaacaaacaaaatatatatatatatatttatttcaggagctgagtgtggtggcttgtgtgtgtggtcccagctactcaggaggctgaagcaggaagatcacatgaggccaggagttcaagaccagtctgggcaatatagcaagaccctgtctttaaaaaaaaaccaaacaccccctcaatatttcagaacagaagagtgctgcctgtgttcctcatagggccacccctccccccatgttaaccctttagttacaagatggagggaaggtaggggctgtggaccccacgtctatgctgagacccgaatgataaatagaggctggttggctgcagaaggtgggaagaggtacaagctgaagtcacaactcctggaaagagcccgaggcaagagagcagatgaacaagtgagactatagggggtttagggaataatcaatgaagagactgaggtccattgaggtggttgaaagagaagagcttctttctcccccagcccatcttacagatggacaaactaaggcccagagatagccacggagcttcctaaaatcactcagccaggactaggacccaggccatctgactcccagcccagaggggagtcagaagtgggtgtggagcctgctctggggaggggagggacagccacactgaccatatctgtctgtctgtcctgcaggcccggggagaaggagagatgtctaaatccctatggttcaaaggcgggtaagtaatgaaactgtgagcggtgggaggaagatttgaaccccaagtccaaggctggtttgcgcctgagcctcagcccagagaggaggaggaggggttccatttagacaggggacagattgagcttgggcaaaatacgtcactttcataaggcacacagccatacgcagacacaaaagacagtaatctttgaagacagggcggggtgcggtggctcatgcctgtaatcctagcactttgggaggccgaggcgggaggatcatttgaggtcaggagttcgaaaccagcctggccaacatggtgaaaccctgtctctactaaaaacacaaaaattagctgggcatgctggcaggcgcctgtaatcccagctacttgggatgctgaggcaagataattacttgaacccgagaggcagaggttgtagtgagctgagattgcaccactgcactccagcctgggagacagagcgggacactgtctcaaaaataaacaaacaaataaataaataaataaatgtaagataaagcagacactatgaggaactagacactattgggaaatgtacactatatatttgtaatcctggagcaaaatttttgcgttgattctatttttaaatctctttgattattgctacagttgtgggctctttaattaaagatagttgtttagtcttcagtggagaatgtggtcatgtctaacctcttatgttatggattttcaggttagaggatgcacaagatattttaaaaatatgctcaggttttaaaatagcagcacgatagtgaccttccttgtacgtccttggcaaacaggcagggagacagcagctgggactcctaaataaatgagcaggtaccctagctagagagccttggatgcgggtcctgaaatgcggattcctgtgcacgtgatttatgaaggatgtgctctcgggagaaacctgtcagacaaggggaggctgccgagaaaagatgtggtttaggagtctctaagcctcagttggctcctgcagaaagctttgtaggttgaatagccctgcagggcttgtctggagtcattggctgcaggcacctatctcactggccagtgaaaaccttttcggggccaggcttggtggctcacgcctgtaatcccaacactttgggaggctgaagcaggtggatcgcctgacgtcaggagttcaagaccagcctggccaacatggcaaaatcccgtctctactaaaatatacaaaaaattagccaggtgtggtggtgcatgcttgtaatcccagctatttgggaggctgaggcaggagaatcacttgaggctaggagttcaagaccagcctgggcaacatagcgagacccccatctctacaaaagaatttttttttaattagctatgtgtgggccgggtgcagtggctcatgcctgtaatcccagcactttgggaggcctaggcggttgatcacctgaggtcaggagtctgagaccagcctggtcaacatggtgaaaccccatatctacgaaaaatacagaaaattagccaggtgtcgtggtgcgcacctgtaatcccagctacttgggaggctgagataggagaattgcttgaacccaggaggcagaggttgcagtgagccaagatcataccattgcattccagcctgggcgacagagcgagactccatctcaaaaaaaaaaaaaaaaaaaaaatttgctgggtgtggcggtgtacacctatggtcccagctactcaggaggctaaggtgggaggattgctgtagcccaggaggtggaggctacagtgagccgtgattgtgccactgcactccagcctgggtgacagagtgagatcttgtttcgaaagatggctgggcatggtggctcacgcctgtaatctcagcactttgggaggccaaggtgggcggatcgcctgaggtcaggagttcgagaccagcctggccaacatggtgaaagcttgtttctactaaaaatacaaaaattagccaggcgttgtggtgggcacctgtaatcccagctacttggggagctgaggcaggagaattgcttaaacctgggaggcagaggttgcaatgagccaagaaaggtttcatctatattttattttatttttgatacagagtctcgctctgtcacccaggctggattgcagtggcgtgatctcgactcactgcaacctctgcctcctggttcaagcaattatcctgcttcaacctcctgagtagctgggactacaggcatgcactaccatgcctggctaatttttgtatttttagtagagacggggtttcaccatgttggtcaggctggtctcgaactcctaacctcaggtgatccgcccgcctcggcctcccaaagtgttgggattattacaggcgtaagccaccactcctggcctcatttatattttagtatattatttagatttgccttaattcacgttttcattcaaggtgggcaattacatcatctccccatttttcagatgaggagggtgaggccgggtgtctccatttcttaggactgctgtcacaaagtaccacagacgggtagcttaaaaccacagcaatgtattctctcacagttctggaggccagaagtctgaaatcaaggcattggtagagccatgctccctctgaaatctgtagaagagaattcctcccctgcctcttctagcttctagtttgcttgaattccttggcccccgagtattggtttgtagatacgtcgctttctgcctctgctgtcacagagccaccttctccccatgtatctcttcttctaaggacaccagtcatattagattaagtgtctaccctactccagtatgaccttatcttaactaattacatctgtgacaaccccgtttccaagtaaggtcaccttctgaggtagtgggggttagggcatcagcgtatcttttttttgagggacccaattcaaccccttaacacctgggggaggttgaatgttctccccagggctctatgtgaggaatagggacatctgggccctcagtgtccctctgtgtctttcagcccagggggcggtctcatcatcatcgacagcatgccagacatccgcaagaggaaacctatcccactcgtgagcgacttggtaagcaccctcgccctttactccctgagcagagcaggcctgctataagcagtgcacaacctgtggaactgcccatggtcaacctggggttgggggccagctaggcattctctgagactaatgtagtctgatttctacccccatgtgctgcgtggacacttcaggccatggtgagtgatggcgacatgggcctcttgggatcttctccccaaactcccccactgggatcttctaacaggcccccaattcatggattatgggggaaccttgccatgtcccactgtgttggatgctgtgagtcaggggtgcggggctgctcactttccagggtcccttctaactcaaagcctctgtcacctcctaattctttgttgggtctggcccggatgctgtcggtgacctgtttccaacttgcggttgtggctccaaaatgtggctgctggccccatccgtggctgtgaactctcctggtggtgatctcatggatgtcaacccccccgactccctcttctgtgacctccccagtccctggtccagtccaggaaagcgggcatcacctcggccttggcctccagcacgttgaacaacgaggagctggtgcgtggggcacctctttttccccgggtcagggatggactgggctaggagcttctggaattgtccaagcctctgtgggtccccgggaagaggaagggtgtgtgtgtgacacagactggcagaaggcagcgtggattccgacagcgtggaggcaggggagggcctgggactttaccgcgctcagtgatggggcggaatggggcaggacagggacagcgccaggttaggcgcccccaaaccgcaccccatccctccctgcagaaaaaccacgtttacaagaagaccctgcaagccttaatctaccccatctcgtgcacgacgccacacaacttcgaagtgtggacggccaccacgcccacctactgctacgagtgcgaggggctgctgtggggcatcgcgaggcagggcatgcgctgcaccgagtgcggtgtcaagtgccacgagaagtgccaggacctgctcaacgccgactgcctgcagcgtgagcgcagggcctgagcgcagggccacgggttggcgtggggagccccggggcttgcatggcggggaaaggctgaagggcaaggcgatgggtggggcaccatggggcggggcaaggggcggggcgtcgtgaggcaggggagggactcgctgaaagggaggggtggggttaaaggcgcaggactccctggtggaagggctagggggtcgaggggtggggaaagaagctgtgagggtgtcagagaggggtggggcagggctcagggactagctaggttgtgcaaaggacaggcttagtgagaagaggcagctcccctggataaaatgggttagctaggggtagctctgagaggaagaggggctcagagagggaaggggttcagactgcgagaggactgtggagggggggattggaagggggaggggactcagaggaggtgggaccaagagaaagggaggggtctgagagatggaaggggctcaggaatgtggaggggactcgcaggggtggagatcagagacgaggaggggattcagaggagtggggctcagagaggcagcgggactcagaggggtgggactcagagagggggcggagattcagaggggtgggacgcagagggggcggggactcagaggggtggggcttagggaagaggccttagaggggtggggctccaaaaaccagtggggactccaaggggtgcggggcagagaagggcaggacgcagggacatggcgactcagaggagcatggctccgagaggaggtggaagggtgaagggtctgggtggggggtacagaaagcaggtaggaaaccggcttcagggggtgacacctgagtccccccggttgatgagtaggggcggggctctcgccttggtgaggggccactatgcagggcgcgctggggtcagcgccggcctcgggcgtcctcaggggctgcggagaagagctccaagcacggggcggaggaccggacacagaacatcatcatggtgctcaaggaccgcatgaagatccgggagcgcaacaagcccgagatcttcgagctcatccaggagatcttcgcggtgaccaagacggcgcacacgcagcagatgaaggcggtcaagcagagcgtgctggacggcacgtccaagtggtccgccaagatcagcatcaccggtgagggggcgtgggccgccatagggcccctccttctccaccctctgagacctgtctcatgccctgtcccatggcctggtccctctcctttgcagcgcgcactcactcggtcgggtgcattccatctcatctccgtgtgtgcacgcatatggggggacatgcgtgcctccaaacgcctgttcatggcactgtatctgggtgcgtcttggatggtgccctccagaatgagactccaagaagaggaattgagggtgcatggtttatctggaaagtgaccccagaaagtcctggtgaggggcaaggacttgagacagggatggaaggagtcctgaaggagatgccgttgagcagacaatgctgtgggcaagggggtcagcccatcctggggccactggggacaatgtcgagcatgcagctcagtgtggccccacttaggggcgaggatactggcttttctccacacccagcctcatgtgggtttccccataaacagacctgaggatgaggatttcaggttatgtgggttatccaggaagtgaccccaggacggagctggggtggtaagtcagggagggaaggaaccctgcagggggcaccaacgagcaggagatctcggggggcaatgggttcttgtaagtgtctgacctcagggagttcacacctgagagaggtcctacccatgcgcaaggcagctggggcaccttcccatccttcatggtttggggactccttcccagcactttgggaggctgaggctgaggcaggcggatcacctgaggtcaggaattcgagaccgacctggccaacatggtgaaaccccatctctactaaaaatgcaaaacgattggccggatggggtggcacgtgcgggtaatcccagctacttgggaggctgaggcaggagaattgcttgaacccgggaggcggaggttgcactccagcctgggtgacgagcaaaactctgtctcaaaaacaaacaaacaaacaaacaaacacacaaaaaacctctctggcaagcccagcgtgccctgccattgctctccagccatgctgcaggtgtcccaattatcagcctgcagcgtgtggcagtgactgtccccagcatgcctcgcttcttgagtgcacacctgtgtatgccctctgtgtcttccagtggtctgcgcccagggcttgcaggcaaaggacaagacaggatccagtgacccctatgtcaccgtccaggtcgggaagaccaagaaacggacaaaaaccatctatgggaacctcaacccggtgtgggaggagaatttccacttgtaagtgcctggctgggtccctggccccatgtggggcatcctgctggggcagccaaaagagggctccaaggacaggactcacactggctgcctgacccctgcctctgcctcctcctcccgccacagtgaatgtcacaattcctccgaccgcatcaaggtgcgcgtctgggacgaggatgacgacatcaaatcccgcgtgaaacagaggttcaagagggaatctgacgatttcctggggcagacgatcattgaggtgcggacgctcagcggcgagatggacgtgtggtacaacctgggtgagagaagctgggttctgaagcgggtggggacgggtcccagggatccagccagagcatggagcccacgaagagcagagagatgtgttctcaggaggagtttggtcgaggagcataatctgatgggggaggcagggtctaggagcccagtttgatgggagcaggaagcacccaggccaggagggtgagcagagcccaggaacctcttagttcagcttaggagggagggtggggacagaatctccatgttctagtctaatgggggaggcaagaagcaagaactgggaatcctagtctgaggggagagacagagacctaggaactaaatctaagaaagaagattgagctttaagaatccaggctggggccaggtatggtggctcacgcctgtaatcccagcactttgggaagctgaggcaggcagatcacatgaggtcaggagttcgagaccagcctggctaacatggtgaaaccccgtctccactaaaaatacaaaaattagccaggcgtggtggtgggtgcctgtagtcccagctacttgggaggctgaggcaggagaatcgcttgaacccaggaagcggaggttgcagtgagctgagactgcgccactgcactccagcctaggcaacgagagcaaaactcccactcaaaaaaaaaaaaaaaagaatccaggctgggggcgccgggcagtggctcacatctgtaattaatcctatcactatgggaggctgaggcaggccaatcacttgagtccaggagttcaagaccagcctgggcaacatagtgaaaccccatctctataaaagatacaaaaattagctaggcagggtgacactcacctgtggtcccacctactctggaggctaaggtgggaggatcccctgagcctgagaggtaaaggctgcagtgagctgtgatcacactgctgcactccagcccagggaacagagtgagaccctttctcaaaaaacaaatatggccgggtgcagtgtctcacgcctataatcccaacagtttgggacggctgaggcaggcagatcacttgaggtcaggagtttgagaccagattgtccaacatggcgagatcaagcccctgcactccagcctgggcaacaaaggaagactccgtctcaaaaaaaaaaaaaaaaaacaaaagaaaaagaaaaaaaaaatggaatccaggctgggcatggtggctcccacctgttatcccaacatattggttgggtggctgagctgggagggtcacttgagcccaggagttcgagaccagcctgggcaacataacaaggcctttgtctccattaaaaaaaaaaaaatagctgggtgtggtgatgcgtgcctgtagtcccagccacttgggaggctgaggtggaagcatcatttgtacctgggaggttgaagctgcagtgagctatgatcatgccactgcactccagcctgggcgatagagcaagactctgtgtccccccgaccccccaccacaagaaaagaatccagtctaaagagggaggtattgtttgggaatcctaatctgagatggctgctacagatcaaagaaccctgtgtaaggaagttgagtagaatctggggagtccaatctaatggaggaagcagggtgtatgagcctaatctgagggggtagaaaggacccagcctgagagaggtgagcagagcccggaaacctcttagattggaggacatctagatatcccattctgatgggggaggtgggagacaagaccagggggtcctagtctgaggagagaggcacagacccaggaacagtgtctaagatgtgtagtctccggggagcatgatctgatgggggaggcagggcctgggagctcagactgggaaagaagtggggcctagggctgctagtctaaggagggaggcacatagccaggaacttaatctgagtgaagaagcaaggtctgggatccttgtttgaaggaagagacagggcttaaggaattctagcctaaacagggagactcaagcctagggagccaatcagaagagagacaccaaagccttagtttccggaagtctgggaggactacagaatcgtgtatctattaaaaattgccttgggaggccgaggcgggcggatcacctgaggtcaggagttcgagaccagcctggccaacatggtgaaacctcgtctctactaaaaataaaaaattaggtgggtgtgatggcacatgcctgtaatcccagctactcgggaggctgaggcaagacaattgcttgaactcaggaggtggagattgcagtgagccaagattgcgccaccgcactctaacctggaccacagatctcaaaaaaaaataaaataaaaaaaaatttgcccatggctggccgggcgcggtgactcacgcctgtaattccagcactttgggaggctgaggtaggtggatcacctgaggtaaggagttcgagaccagcctggccaacatggtgaaaccccgtctctactaaaagtataaaaattagctgggcacggtggcaggcacctgtaattccagctagttgggaggctgagacaggagaatcgcttgaacccaggaggtggaggttgcagtgagctgagatcgtgccactgcactccagcctgggtgacaagagcaagactccctcttaaaaaaaaaaaaattgcccactgctatagtgggaagttctgacactgtcttctttttctgccctgcagacaagcgaactgacaaatctgccgtgtcgggtgccatccggctccacatcagtgtggagatcaaaggcgaggagaaggtggccccgtaccatgtccagtacacctgtctgcatgaggtgagggtcattgctcggcccctcccatgccacttccactcaccattcctgcctgcccagctcttcctctttctggccacaccatccacactctcctggccctctgagactgcccgccatgccattccctttacctggaaaactcctccctatccatcaaagtccagattcagggtcacctcctctgggaagcccaccttggcctccaggttgactctcactactcatcatcaggttcttccttctattccagccctaaccactcaggattgggccgtttgtgtctgggtatgtctcttccagctgcctgggtttcctggaaagaactcttatccccaggaactagtttgttgaataaatgctggtgaatgaatgaatgattgaacagatgaatgagtgatgagtagataaaaggatggatggagagatgggtgagtacatggatggatagatggatgagttggtgggtagattcgtggctagatggatgatggatggatggacagatggatggatatatgattgaactattgaaagtatagatgtatggatgggtgaatttgggggtaattgttagatgatggatgagtatagatgaatgatggatggataacttgatgagtggatagatagattgctggatagatgattgactgggtggatagatgaaatgttggatgagcagattaagttgtattggatgggatggatggaagtgtggttgagttattagaaggaagattgagtagataggtgaatttgttgatagtcagatgggtagataggtagatggatggatggatggatggatgtataggcagatggacaaatggatgaatgggtgggtggatgaatggaaggatgtgtggttgaactattgcaagtattgataattgggttcataatttctgaatatttagatggatggttgtgagtggctggtggacagacgaaaaatggatggttggataaattgatgggtggatggatggttggttgtatgaaagaatgaatgattgggtaggtggattaagttgcggatcaatgtatgggatggatgaatggatggatggatggatgtgtggttgaattactgaaaggttggaagagtggatgggtgaaatttggggtagttagatgggtgggtgtgtggatggataaaagagtagatgaatgaattaatgaataaacaggcagatggatgatgtaagctgccccagaccctgggacctctgacccccggcgaccccttgcactctccatgacactttctctcccatggtggcagaacctgttccacttcgtgaccgacgtgcagaacaatggggtcgtgaagatcccagatgccaagggtgacgatgcctggaaggtttactacgatgagacagcccaggagattgtggacgagtttgccatgcgctacggcgtcgagtccatctaccaagccatgacgtgagactgcaggctggggtgcaggaaacaagagggaggtcaccaagtgggcactggcaggtctggggtgggagggattctcagggggaagacccagagaggaagtgggcgtggtggtggtgggttccgtaattcccctggagatcaggagagcgctgtgattgacacctggagtgacatggaagagagggaagacttagaagcagagatagaggctgggcacagtggctcaagcctgtaatcccagcattttaggaggctgaggtgggcggatcactccaggtccaggagtacaagaccagcctggccaacatggtgaaaccccatctctactaaaaatacaaaagttatccaggtgtggtggcttgggcctgtaatcccagctactcgggaagttagggtgggagaattgcttgaacctggggggcaggggttgcagtgagccgagattgcgccactaaactccagcctgggtgacagagtgagactccatctcaaaaaaaaaaaaaaaagaaagaaagaaaaaaagaagcagaattagagcaactcaaatggatataaagatggaggggagaggagatgcggagacccaaaggacagaatcaggcaggggatggtttaggaggtgacagagacccactcacagatgctatcttggaggcattctaggggggatcttggtccatcctggctggacccctggcctagtgcctcctgctccctctctccagccactttgcctgcctctcctccaagtatatgtgcccaggggtgcctgccgtcatgagcaccctgctcgccaacatcaatgcctactacgcacacaccaccgcctccaccaacgtgtctgcctccgaccgcttcgccgcctccaactttggggtcagtcctggggactgggattggagaattagggagagcccaactttatgccggtcagatctgatgtgacttctgggtccccagtctagacctgattgctgtgtgactttccaccagtcacttcccgtctctgagcctccatttattcctctgtagaatgctatagaatggaggtcgggcgcagtggctcatgcctgtaatcccagcactttgggaggccgaggctggagaatcacttgaggccaggagttcgagaccagcctggccaacacggtgaaaacccgtctcttctaaaaatccaaaagaaaattagctgggtgtggtggcctgtgcctgtagtcccagccacttgggaggctgaggcaggagaattgcttgagcctaggagtcggaggttgcagtgagctgagactgcgccactacactccagcctgggcaacagagcaagactctgtctcaaaacaaaaaaaaaaatgccatagaatggaaatggacattatgagggtggtggatgaggtatacttactgtacagtaggcgctcagccactatggcggccatgtcctgcctccatccatcctccctcctccccttcctcctcagaaagagcgcttcgtgaaactcctggaccagctgcataactccctgcggattgacctctccatgtaccgggtaggaagtgtgtgcatgagaatttgctcaccccacgcacatgtgtgtgcctggaggggaaagctaccagcaggtgtgtgcatgggaggacccatcttcgcatgtacgatgtgttcctccagcatgtgtgcacctgcatgggcactacctgccgtaatgtgcttggtgcatccaagcagatccccagttgcttcgaggtgctctaatcaacccccagcctgaaaccggggagcctttgtatccccctgaaaagcagtctcccatcctccccacgccttcttccataaccccacatctcttcctgctcccaacagaataacttcccagccagcagcccggagagactccaggacctcaaatccactgtggaccttctcaccagcatcaccttctttcggatgaaggtaggaaaggatccagttgcctttgctctccaaggagggttctctaggatccccagctcccaggacaagtgacattcctcctggagagtggcagcctttctcagtaaccttttcctttcataccacttcatttccttaaacccaaaatgactcgcagtcacttcctggggacctcctgtcacagctgtggccgcctatgcctctctccctcccttcaggtacaagaactccagagcccgccccgagccagccaggtggtaaaggactgtgtgaaagcctgccttaattctacctacgagtacatcttcaataactgccatgaactgtacagccgggagtaccagacagacccggtgagactccagatgggtcagaagggaacagtgatgccaactagacacaggcttcagtcccagccctgccccttcccgagggatttaactcttctgaacctcagtatcttcttctataaaatggggtcattaacccacatctcaggattagggagaagagttcatgagctgtaagtttagataaaatatagtcggcactcagtacatttggttgcgtagttgagtttggcataaaaaaaaattttttttttttgagataaagtttcactcttgcttcccaggctggagtgcagtggtgtgatctcagctcactgcaacctctgcctcccaggtttaaatgattctcctgcctcagactcccgagtagctgggattacaggtgcccaccaccacacctagttaattttttgtatttttagtaaaaacggggtttcaccatgttggccaggctggtctcgaactccttgacctcaggtgatccacctgcctcggcctcccaaagtactgagattataggcgtgagccaccactcccagcctggcataaaaatttatgtctggcatacagtcactgttcagtaaatgttgagttgaattgaatttatttatttattttgagatggggtcttgctctgttgcccaggctggagtgcagtgatgcaatcatggctcactgcagcctcgacctcccaggctcaagtgatcctcccacctcagcctcccaagtagctgggactataggcacgcaccaccatgacaggctagtttttgtatttttgtggagatggcatctcactatgttgcccaggctgatctcctgggctcaagcgatcctcctgcctcagcctcccaaagtgctgggattacaggcatgagccaccacctgtaaggagcttatagcctattatgagggaaagatgtacaaactggaaatttacaaacagggatggttagtattgagatagtgggatctcaggaggctgtgggagctggaggcagcccctacccaggttctgataggatataacacataagctgtgttcagttcaatttgatttcattctgttcctttacattcagttgactagagttggaatcagtctcactctcatttgaattgagttgaggtgaactggattaaattaggctataaggagcttatagcctattatgagggaaagatgtacaaactggaaatttacaaacagggatggttagtattgagatagtgggatctcaggaggctgtgggagctggaggcagcccctacccaggttctgataggatataacacataagctgtgttcagttcaatttgatttcattctgttcctttacattcagttgactagagttggaatcagtctcactctcatttgaattgagttgaggtgaactggattaaattagattgtttagttcaaccataatcagtttagttatatttatttctatttggttgacttaagttaaaattgttcttgacggccaggcacagtggctcacgcctgtaatcccagcactttgagaggccgaggtgggtggatcatgaggtcaggagatcgagaccatcctggctaacacagtgaaaccccgtctctactaaaaatacaaaaaaattagccgggcgtggtggcgggcacctgtagtcccagatacttgggaggctgaggcaggagaatggtgtgaacctgggaggcagagcttgcagtgagctgagatcgcatcactgcactccggcctgggtgacagagcgagactccgtctcaaaaaaaaaaaaaaaattgttcttgacaaattagtgagccaggctgggctcagtggctcacacctgtaatgtcagcactttaggaggctgaggcaggaggatcccttgaggccaggagctcgagaccagtttgggcaacatagcgagaccctatctttgcaaaatatacaaaaattagccaggtgtggtggcgcacctgtagtcctggctactttggaggctgaggtggaaggatcacttgagcccaggagttcgagtctatggtgagccatgattgcaccactgcgctccagcctgggtgacagaatgagactctgtctcttgaaagaaaaaaaaaaaaaatagagagaagaacaagttggttgattgcattgagttttattgagtacaaattcattcatttccatttagttcatttacattcaagtcaagttgttctcaactgggttaaattgtcttgagttaggatgaactgggttgttggattagatgcaattgatttcagttgaattgggttgaattgggctaatttcagctgattatattcatttccattgattaacaaaggtgggttgaattgccctgcgtatgttcagttgggtttagataggtagaatcggattgggttgacttgggtagagttgagttcgagtcgatttatttccattattttgatttgggttgatgttgatcttggacaagttgattaggttcaatccaacggaattcatttgagtttaattcaatccagttaggttgaattgcactccattcagtgtgattggcccaagttcagttccattgatttaactcagaggaagaacttacttccgttaagctaagtgggcttaatttgcattcatttcatttccatttggtttagtggagctgggtttgttcaactaaatttggtttcatttatttccattcacttttagagtggagtctaaaaatcttaagctttatcaagctgcattgacatgagctctgtttgggccagtttatgagttcaattcctctctatatagatttcttacctgaaccatacacatgatgatgggatgcattcctctaaaacctcttgttcttcagtaataaactgaccgaggcaccaacctctggaccccctataaccgaggtctccactgtccatttcaggccaagaagggggaagttctcccagaggaacaggggcccagcatcaagaacctcgacttctggtccaagctgattaccctcatagtgtccatcattgaggaagacaagaattcctacactccctgcctcaaccagtgagttgtgtatctgtgtagttaattatctgggtgtcatcgtgtgtatgtatacaactttgtgtcttgtgtgtcaagatgattttgtctaattacacaaatgtgcacctgggggtaattgtgggtctgattatacctgtgcaaaattcaaatatgggtacaatttgcaaacataaacataaaattgtgtgtatgttcacaatcactggtataatcagacatgtattttgtatgtattcatttgcatgcataactgtgtgtacatatgtgtataattttttatgtgtatgtaggttaattaataatagtgttgctcaagtattactatgtgctaccctaatacatatcatacatttaaattgcattatatcttatatgtatggatgtaagtaattttgtatattgttgtggtcagtgggttttgggtttaatttgtatatgtgtaaaatcattgaatgcaattcaacgtacaatattgtacaatatacaatattgtgtattgtgtatgaatatgggcacagttttcatttgtggatttatatgtctgtagaattttcatctgtgttagctgaatgagctactgtgttctatttctctgccagatgagtgctagagaggactctagctttggggcgttaacatatcctggttagggaattaagatcagggatttggatggattgaagggtgggtggatgaatggatggattaataaacagatggggtcaggcacagtggctcacgcctgtaatcccagcactttgggaggccaaggtgggtggatcatttgaggtcaggagtttgagaccagcctggccaacatggtgaaaccctatctttactaaaaatacaaaaattggccacgcgcggtggctcacccctgtaatcccagcactttgggaggccgaggcaggcggatcatgaggtcagatggagaccatcctggctaacatggtgaaaccttgtctctactaaaaatacaaaaattagccgggagtggtggtgggcgcctgtagtcccagctactcgggaggctgaggcaggagaatggcgtgaacccaggaggtggagcttgcagtgagccgagattggccactgcactccagcctgggcaacagagtgagactccgtctcaaaaaaaacagaaaaaacaaaacaaaaattaaccgggcgtggtggtacacgtctgtaatcccagctagtgggagactgaggcaggaaaattgcttgaacccaggaggcagaggttgcagtgagtcgagattgcgccactgcactccagcctggggtgacagagcgagactccgtctctaaataaataagtaaataacagatggacagatagattggtagaaggatgactgtgtggataaaggaacggatgggccaggtgtggcagctcacgcttgtaatcccagcactttgggaggccgaggcgggaggatcacctgaggtcaggagtttgagaccagcctggccaacatggcaaaaccccatctctactaaaaatataaaaaattagccgggcatagtggctcgcgcctgtaatcccagctacttgggaggctgaggcacgagaatcatttgagcccgggtggtggaggttgcagtgagctgaaatcgcaccactgcactccagcctgggtgacagagtgagactccgtctctaaataaaaaaaaaggaatggatggatgggtggacagatggatgggtaaatggatgggtggatagctgcataagtgagtaaataaatggatagagggatggatggataggtggatggatgaatagatagatgggtcatttaatgggtgggtggatagttgtatgagtgggcgaatgaatggatggaaggacagataaataggtggatgatggaaggatggacggatggatggatgaacagatagacgggtaggtggctggatggacagttggatgaatgggtggagggatagatggatgaacaggtagatgagtggttgagtggatggatgaatagttggatgaatgagcaaatgaatggatggagggatggatggatagatgaatagatagatggataggtgaacggatgggtggatagttgcataattaggtgaatgaatggaaagagggatggatggatggatgggtggatagatgaatagatagatgggtaggtggatggatggatagttggatgaatgggtagagggatagatggatgaacagatagatgggtggttgagtggatggatgaatagttggatgaatgagtgaatgagtggatggagggatggatggataaatagatagatggataggtgaatgaatgggtggatagttgcataagtaggtgaatgaatggatagagggatggatggatgggtggatggatgaatagatagatgggtaggtggagggatagatagttgcatgagtgggtgaatgaattgatgaagggatggttggatgggtggataatgggtggatggatgaatagatagatgggtacatggatgggtggacagttgcatgagtgggtgaatgaatggatggaaggatggatgaatggatggaggaatagataaatgagttgttgaatgtatgggtggatagttgcatgagtggatgaatgaatgaatggagggacaaatggatgagtgggtggaggctcaaagggaaacaaagccttagtgcagagtcagtcagcagtggctatgagggaacctgaacccaaatccctctaccctaccctacactcctctgtggggcagggaaggacaaagcagcccatcccatctgccttctgcctgccaaagttttatacttccatgactttgccaggtttccccaggagctgaatgtgggtaaaatcagcgctgaagtgatgtggaatctgtttgcccaagacatgaagtacgccatggagggtgagtttcccaccccagtgttccccagcctggccacaccaggtggctgtacctctgtgtcccctccaaggctgtgagcaccctataataccctcatgcctgagttggaaatcagtgatggccagagtaggcagcctctctgccgagacagagggtggcagacccttccagctgtgccatcctctttgtccctggccagagcacgacaagcatcgtctatgcaagagtgccgactacatgaacctccacttcaaggtgaaatggctctacaatgagtatgtgacggaacttcccgccttcaaggaccgcgtgcctgagtaccctgcgtaagtcccctgccccaggcccaacccaagccagaactgtagcactgacagctagaaggaaagccagagaggaagactgacctacttagggttacctgggcatcaggggcatgggtggggcttgaatccagtgttctccactctcagccattgagcagttgactcctacagcccagaaaattcagtcaacagcaacaggaaccatgtgactttctcattttatccttttgacaattctatgagttaaggtgggatcattttaattcctattttgcggaggagaaattggagagttaaagatgccaaatggccaggcatggtggcacatgcctgtagccccggcaatctgggagactgaggcaggacttgcttgagcccaggagttcgagaccagcctggaaaagatagtcagatcccatctctaaaattaatgaatgggtcaggcacagtggcttgtgcctgtaatcccaggactttgggaggccgaagtgggcagatcacctgaggtcaggagttcgagaccagcatagccaatagggcgaaaccccagctctacaaaaatacaaaaattggccgggcgcagtggctcatgcctgtaatctcagcactttgggaggccaaggtgggtggatcaccagaggtcaggagtttgagaccggcctggccaacatggtgagaccctgtctctactaaaaatacaaaaattagccaggtgtggtggcagatgcctgtaatcccagctacttgggaggctgaggcatgagaattgcttgaacccaggaggcggaggttgcagtgagccgagattgcaccactggattccagctggggcaacaaagtgagactccgtctcaaaaacaaagaaaaaaattatccgggtgtgatggcacacacctgtagtcccagctactcgggaggccgaagcaggaggatcgcttgaactcaggaggcagaggttgcagtaagcggaaatcgtgtcactgcactccagcctgggcgacagagtgagactccatttcaaaaaataaataaatataaaaataaaatgaatgagtgaataaatgccacattccttgcccacggtgactcccagtacatgacagacccgagatttgaactcgggacatctgattcctgggctgtgtgttggaggatagtacggtgccgccggttcctgagaattgtggtgtcgttctctgctcccagcagcacaggaggatggctagtcttctgttgtacaagaaacgaaagctctggctggatgcggtggctcattcctgtaatcccaacattttgggaggccaaggtgggaggatcacttgaggccaggagttcaaggcctgcctgggcaacacagggaaatcctgtctctacaaagaagacaaaaaaaaaaattagccgggcatggtggcatgtgcctgtagtgccagctattcgggaagctgaggtgggaggattgcttgaacccagcaggtcaaggctgcagtgagctgtgatcgcaccactgcactttagcctgggcaacagaacaagacccaggaaggaaggaaggaaggaagaaggaaggaaggaaggaagggagggagggagggaaggaaggaaaggagggagggagggagggagggagaaaacaagagctcagagaataaacccacttgccatgggcagtttatctgaagaaggaaggaaggaaggaaggaaggaaggagggagggagggagggaaggatggacggaggactcagagaggactcagagaataaacccacttgccatgggcagcttatctgaactaggattcccacaggcctgggccctgttgtaaaaggggccactcaatctatttcatgagcaaagtaactgaggttcagtgcaggaggcgagcagaggagcagccactcaaggctgcagggagagctccaggcagagcaggagcagccatagctccactcgttagtgggtcagaaccaggcggcgcagaggttgaggaggacaagaggtggcagagccccaccccggctcttcattccagatggtttgaacccttcgtcatccagtggctggatgagaatgaggaggtgtcccgggatttcctgcacggtgccctggagcgagacaagaaggatggggtaagaaggcccacccacaaccaagttcctaatcttcccactggggtcaatttaggtggaaatttgcccttgagatgaggccagtctctggtaggtgtccgccatctttgtcttgctcatggtttttaaaatcttttgttcattcatcaactacaaaatgtgagttccatcaagccggacacctccaggcaccccatggcttctgcgtccacctctagagttgactctaagtctacctcgccctctgtccatctcaccccggggaaattggtctctggctctccccgtggagagtgggagagttgggctctagggattctctggtgctgatctcctccttcctcttggcctccttccccctgcagttccagcagacctcagagcatgccctattctcctgctccgtggtggatgttttctcccaactcaaccagagctttgaaatcatcaagaaactcgagtgtcccgaccctcagatcgtggggcactacatgaggcgctttgccaaggtgtgggagagtgggtagggttggggctaggggacagggtcagggttagggaattgaagtctgagttggagatgggctaaggttgaggttgaggttggagttggtgatgtcattgaggttgggattgaagttggagtttgggttgaggttggagttgaagtttgggttgaggttgaggttgagatgaggttggagttgaggtttgaatggaggttggagttggggttagggtttaaattgagattggagttgagattggggttggagttgaggtgtagggtaaggttggagttgaggtgtgggttgagatcagggttggaattgaggtcattagtgcgagttggcaatgctgtttggttggagtttgaggctgtgctgggtcttgatttggaattgagattggagtgagtgctgagattgatgcacaatttgagtgagtcttggggtgagtttgagggttgggatcattggggttgaggtttgattcattggcattaggctgtgttgaccttgggaattacaagtaggaattggcttttgatttgagatcaggtcatcttgtggttgaggctgggttaatatgatgcttggttgctctgaaaaagagctgggtctacataaaatgatcatcttcatcgagcggtatctcctctaggtcttgatggtcatcttgagtggagaatttgcctagcccaaaggcccatcttaggtcctaatagggtttgggttcatcactgatctcactagtggccttgatgggacgactggcgcctgccttggtgccagcctctcctctcacccacactctgtgtcttccccagaccatcagtaatgtgctcctccagtatgcagacatcatctccaaggactttgcctcctactgctccaaggagaaggagaaagtggtgacctgagggggcccctgacctatctccctcctcagccccattcagcatccccaggactcccttctccccagggccctgacacctggggctatgtatgtccacctgtgtgtgatctgactggattgtctgtgtgtttagaggtgcttgtttgaatgtgtgtgatcagagtgtatctagttgtgtgtgtctgagtgtatgggaagtaagtgcatgtgtctgactgtgtattgtctgtgttgactggtatactctgcgtgtgtgtgtgtgtgtgagtctgtgcacatctgagtgtgcgtgtctgatcatgttttgtctggctttgttaacagggtatggcatgaatgtgtgtgtgagtccaactgtgcacgtctgagtgtgcgtgtgtgattgtgtttcgtctggttgtgttaactgggtataacatgagtgtgtgtatctgtgtgattgtgtttcgtctggctgtgttaactgggtataacatgaatgtgtgtatctgtgtgtgtctgtacatatctgagtgtgggtatctagccatgtttcatctgtgttaaccgggtatagtgtgagtgtatgtatgtgtgagtatgtgtgttcaactatacaacacatctaggtgtgtgtctcatattttatctagctgtgttaactggttatagtgtgagtgtgtgtatgcttgtgtgtgtgtccagctgtgcatgtctgggtgtgtgtgaccgtgttttgtctggctgagttaactgcatatagtgtgagtgtgtgtgtgtgtttgtgcacgtctgggtgggtgtgtctcaccaggtttggtatggcggtgttgaatgtgcgtggtgtgagtgtgtgtctatggctgtgtctggctgtgcatgtctgagtgtgtgtatctgtggggggggtctcgtgtgtatatctcggggtgagggcacacgccttcagtgtgtcactgtctggctgttgcaaatgaagccttcagggtgtgagctgcaaagctttgggctcttgcaggaaactctgctactcccagagttcccagcccctctcatggaccccccaccaggcctggggtcgtgggattacttgagtcctccttgcccccaccagtccccagagatgcccgccccaacaacacgcccaggaacctgagcacaaaagctcccttccatttgcaggtgaccccatgggaccccagcttcctccagacccagaccctgaaaccatcccaaggtccctggcggtgggtaggggaggctctggggagaggtcctgaggcttgactcccctctctgttcccacccacagccctgcattctcatgaataacactcaacagctacgagttcagctggagaagatgttcgaagccatgggaggaaaggaggtgaggcagggccgaggcagggctggagaagggatggggcacccccaccactgtgtccctgcaggcccctgagctcatatgccaccaggcctggggatgaattccagctcaaccatggccttaaacccaggcttgcagcataacggtctgtgcctcagtttcccctgcagccccttgggatccctttccctgggtcagatgagaaaatgcccagtacatgtggatacttactgaacctggcctggtgtcccttctccctccttagctggatgctgaagccagtgacatcctgaaggagcttcaggtgaaactcaataacgtcttggatgagctcagccgggtgtttgctaccaggtgggagcatctccagggctgggggcagtggggagggaacagccttcagccctctaagcctggggcatctggaggctcagcagatgtagaggtgaagattgcaggctcagagttagacaaggctgagttcaaatcttggctttactgcttactagctgtgtggccttgggtgagtcacttaacttctctgagccttatttttttttttattgctctgtaaatttggggtgatgacaataatagtacctgggtaggattttgagaatgaaatgaacaatgcgggcaaatgtcttatccctttgcctggttctgcagttactattttccactctttttttttttttgagacgaagtctcgttctgtcaccaggctggagtgcagtggcgcgatctcggctcactgcaccctccacttcctgggttcaagtagctgggactacaggtgcatgccaccacacccagctaatttttgtatttttagtagagacagggtttcaccatgttggccagggtggtctcgatctcttgacctcgtgatccgcccgccttggcctcccaaagtgcttggattaaaggcgtgagccaccgcatctggcctgttctccattcttgctcggttatgtgctgtgatgcaaatgatatgacctcaaggaccacagatcagcatctgtgtcctcatccagcccttcctgtggtctgagcccttcccttctgtgtccccagcttccagccgcacattgaagagtgtgtcaaacagatgggtgacatccttagccaggttaagggcacaggcaatgtgccagccagtgcctgcagcagcgtggcccaggacgcggacaatgtgttgcagcccatcatggacctgctggacagcaagtgagctgggccaggtggactgggctggccggggaggggctggggcagggccatagagacccagggactggctggagagggtgtgcagggaatgtttgctgggtggtcactggatagttggatggctgagtagatggtggcatgaaggggatggaaagttgggtgggtaaataattggaaggattggtgagtaaatatttgtgtggatgaatgaatggtggatgaataggtgacatgagggatgggtaggtgggtggacgcatggattaaaagataaatgtttagaaggatagagggaggatagatgttttaaaaagatggatgggtggatagttgggtaaatatttggatggattaataaatgttttgatgcatagatggattgatgcttagatggatggatgtctggcaggctggcttgatggatggttggatggacgatggatggatggatggatggatggatggatggatggatggataaatggttggatatgtggataaatatttggatggatgaataaatgttttgatgcataaatggatggacagatgggtggatggatgaataaatggatgggtgggtagatggatggatagataggtggataaatatttggatgaatgaataaatgttttgatgtatagatggattgatgcatagatgtctgtctggctggctggatggatggatggatgaatggatggatggataggtcaatagatatttagatcattgaataaatgttttaatgcataaatggatggacagatgggtggatggatgaatggatggttggatgggtgggtgggtagatggatggatgctggatagatataggtggataaatatttggatggataaataaatgttttgatgcataaatggttggacagatgggggggtgggtggatgagtgggtcgatggatggatggattaataggtgagaaatatttggatggatgaataaatgttttgatgcatagatggatggacagatggatgaatggacaggtggatggatagataaatggataagtggatggatgggtagaaggatgcatggaaggatggatggatgaacagatggatggatggatggatagaaaaagaaatagagaattaaggaccactgggggagggatggattggtgggtgactggatcagttggtggatggatcttggtggactgcctgtctccttcaacccctatccatccaaccacaatctctttgctgttttccctttcaagtctgccctcctctgaccattcccctcctgttcctcttgggcatggccttctccctcatagtccctgatctccatccttcctgtttcggttcatcccccacactgttctttcaaacatgaaagtctggctgtgtctccctcttgaacactccatggctccccactacccccatcctgataaaacccaagccttcctcccagacattggggccccttcccatctggtccctgctgactagtccaaccaccactcactcttctcttcatgcatcagatatcatagccccatcaaaccacccaggggtccctgtacaggctgtgggccctctttcctatctgtggaatgccttgcccacctgttaagggaaggtgatctgtgggtgggggcgagctgggccctctctcagacctgcccctcgtccccagcctgaccctctttgccaaaatctgtgagaagactgtgctgaagcgagtgctgaaggagctgtggaagctggttatgaacaccatggagaaaaccatcgtcctgccgcccctcactgaccagacggtgagacctgcagggggcccgaggggacatttaggccacctccctggcgagagcccagaaaacttggtgcctagaggctggggggtaagaacaaaggcatccggtctcagagaggtcatccaggctcaagggccattcaagggtcatggaagccaccagaggtcagtggggggccattcagaggtcagagagttcacacaggggttaaagatcatcgaagagttaaagaggtcattcagagtccattgtattttctctggggtcaaagacatcaggtagagtcaagagaccactaaagtcatagaggtcacatgtaggtcaaaatagctttcaaaggtcagaggtcatctagaaaacaggtcaattttgggatcaaggttatccttgagccacggaaggcatagacattggccaggcaccgtggctcacgcctgcaatcccagcactttgggaggctcgaggcgggcagattgcttgaggtcaggagttcgagaccagcctgggcaacatggtgaaatctcgtctctactaaaaatacaaaaattagctgggtgtgatcctgtgatcctggcttcttgggaaactgaggcacgaaaactgtttgaacctaagaggtagaggctgcagtgagctgagatggcgccactgcacactccagcctgggcaacagaacgagaccctttctcaaaaaaacaaaaaaaaaaaagagaaggcatagacatcaatgggtttttctaagggctttggggctcattcaaaagccaaagaggggagacaccatggacttcagacatcagagatcaatagaccaaggggctcctggaagtcagccagaggtcatggagggcatccaaggtcagagaggtcaagcagagatcattggccatccagagaccaggaccgatagaccagaggccataatctctagggaccaaggggacccaaacatctgtagagggatgtagctgggcgtgggtccctccgggaggcatcaagaacctgaggacagcaatggcatgtgggctgtgggcacattagggagtggggaggtctttcccaggtggaccacggaggcttggggagggtgagcgggggccatagatgggcgacgatggtcggggaggctcggacttcccatccttccacctcttctgggctgggctggggcaggggtcttgcccctccgtgctgccatctctgccccctccctggccttcccgggagactcatggtaccttattcccccctcccccaccgccccgcccccatcacggatgacagatgatcgtaagtagagtcccgtctgtccgtctgtctgtccgtcctctctgtgtctggactcggcccaccgcgtcgctgcacccctctccccacccacccagcgccccctcctcacccaccatcctccctcccgcctagatgtgcctgtgtctgtctggggcggggcatggggagggggcggggctgggagggagggagaccacgcccaccctccctgtcccactgaagtccagaggagccccactacccactcccaaaccccaagcccagctcctccttcgcagcggacctgccgtctaagggtagaatccaaccttgctcccgtgcccagatgtcaccagacgccctgaagctagaaagaggatcaaccccaggattcctctgacctcctctttgggctctgaactgtcagcagcttcccagaatgcaggtcctcaccatgagggtctctacttctgattcctctgaaattccatgctccagaccattccttggtaccccaccaccctgtctacccaactcccgccatccacaccgacacacaccaatcccagacatacacccaggtgcccaagtgggagacttttgtcatggctttgatgtcaggtagacttggggtcaaatcctagcccagccactgtctctctctgtgaccttgggaagtcacttgacctcccagcctctgtttccttgtctggaaaatggggctcattgcatcacctccctgagggtagttctaagaaccaaatggcatgatgcattaaaatactcatctcagtattgcctgaacccaggaagcagaggttgcagtgagccgagatcgcgccactgcactctcagtgaccggcccagaggcagagctaatggtggtggtggtggtggtggtggtggtggtgatatgcagacatgtgtaagagcagagacaaaacaacttcagattttccctttgtgggcaagacaaggctgttacaagatttcactttgttaaaagtttacaagggctcttacttcctggtagctgcagcctgggtctttggctataaccacttggtggcagcatacccaaccacaggcaatgcatttgtaggcagggggaataaaggaattcgcatttaatgactccccatatgccaggccttctcatagctcctgtttcagctcaccttcatgataaccctttgagtgaggtggatattattatccccattttgcagatgaggaaagctgaggctcagagaggagtcacttgttcaaggtcatatagtaaatatatgccagaatcaggattcaaattcagatctgtctgaatatgcagcccatttgctttcctgttaacccaagaaccaagagtctcatgtgtacagtaaatgtaaatggattatattttggcagtggcttttttcccttctttctgactttctttagctctgtatctgtatctttctctctctttcctgtctctgcctctcacaccatttaagagtgagtcactaaagcgcatgcacgtgtgtgcacacacacagacacacacacaaacacactatccccatgcaacccagtcaccagtaccctgtgcagtgtggattcccccatccccatgaatattcctgtgagcatcccagcttcccaccctgcacgacttgccaggttgatcaccctgtgacattatctctgcaggggaacctcttgagaaaacatggcaagggattagaaaaggtaatgagggcctcgtctcactgaggccctgagctccagtgtctgggcatgtgtgtgcatgtgtgtgcgtctgtgcacctgggcaggaagggcagctgggggtcgtgggtaggagatagctctcctaaccaagtcctgcaaaaccagaagtcagagatgaagtgattctccagggacagaacgtgcagtgtgtgtgtccacatgtgaactaatgtgtgtgcacaaacagctcccatcctcccacagcaatacccacagggctcatctgagccctgggctcagctgaaattctgtgccttcttgaggagcctacacgctagatcaccaccctggactgagacgtgttgttttttacgtagatttctttttgttgctgtgctaatgggtgtttgttgttaaggagatgggagctacagcaacacgcaagcagctgtcttgctgtacacttgtgcagaagatatcgttgtacatttgtgtctacaaatggagtcttagctttgtgaatgtgggtcacaggggttccgtactctctctgccagccctttgcggggcacattcagtgtcccaggcaccctatatgtggatgtgaatccgtgtggggtcaagaagggtgtgtgggtttttgtgtgtgatataattgtgtacgtgcctgcaagtgtttaggagtgcacgtatgtagtttagtgtatgggttcttcagcactgagtgaacttacagtatatgttaatatgttttttgtagacttgggtgctgggatataggggcagccccttagggaatggaggaggagacagattcctagccctgtctcatctccccacctccccaggtgccccatcctggggcaggctgactgtgggatgaggctgcttccagcctcctgggtaccccgagagtgtgctggcagtcaaggagtctgacctctaaacccctgctaggggaccagaggaggtgctagctggggagggggcccaccattagacccaggacctggggaggagctcctgggctgggaagtgagactgtgctttgagggggcagggaagtcccactgagtatcctcccaacagtcaccagaactctgacctccacctgattctctccacagggcagggtgaaattgccaagccactcagacgtaagaccggcctctcactgtctgtctggctcccatcccactcccccccaccccacccctgtgcccccttccacctctgtggttcgtgccgtccgagggcgtactgtgaacctgtctgttggtctcttcttcctttgtctgtctggcttgctcgtggggggtggtgggtggggggttggtgggtagggcagagggtacccaggaaggcccctgagccctgccagactacaggtgggtgcagcaggggaaactgaggcccagtccgctggacccctgagtaactgtgccttgtaagaacctcaggatcacagacaagaaataagaatagtaacagccaagatgataatagtaatacctctaggaatgaccagatggccagctggtagactatgaacataattccaaatatttccacagtaaatgggccccctccccacctagcctcacccaggacccccagaccaccccaggacccagtaagacaagacttgttacctcaatactcagccccaccctgtcccccaagttaccatgggtatccctgttagccacagtgggaattgaggctcagagcattcagggacaagcctggggccatccagcagtgacagaggaggctagacacatgccttccaggctgggaccccgtctcccttagcattgcccgtgactttgagaccaagtgataattagcgaacactgagcaaagacttgttcagtccagactaagccacaaagtggatataattttcctcatctagatgggaaaactgaggctcagagaggttaagtgccttgcccagggccacacagcaggactgcaatttgaacccaggcccatctggcttgtcagagccatcaccacatcaccatcttgctagtgtctgtttgggggtggggtggaggacggatatggaggtgtttgtatagagggaggatttttcctttaaaaggtcagactggctggcaatgtggctcacgcctgtaatcccagcactttgggaggctgaggtaggaggatcgattgagcccaggaattcaagaccagcctggacaacacaacaagaccccatctctatgaaaaaaatttcaaaaactagctggatatggtggctcacacgtgtagtcccagctactggggaggcgggaggattgcttgagcccaggagtttgaggctgcaatgagctatgatcatgccactgcactccagcctgggcaacagagggagactctgtctcaaaaaaaaaaaaaaagaaaagaaaaatcagactgaaattcctcccagattacaggggaaatttccctgcagaggggatgctccttgaggaggaggaagtgtttgaccagagccattttctgcaacctcagcctagcctattgtgttcccaaagctccctttccctggaaaccctgcccacacccacaaacaccaccgtctgaggctcccccaacccactgcccctcacagtctggtccctgtctgtttctcctgttacacaagcctgggtggggctgagagggtgggggactatcctcacaggaccgggattttcagggacaaggtcaccacatcctcctcagttcttcctggggaattccagacctctgtccctgggacacaattattgccctgcccagagcctttgggcaagaaccaagatggtctctggggctggagtgtcagctgtagcacccctgccctcacccagctgtatgttgttacctgcagggaacccagatgatcttcaatgcagccaaggagctgggtcagctgtccaaactcaaggtgaggagtggggatagattatggcgtgagggactgccccccaaactcatgtggcttccaggttgccaccatcctgggggaggggtcccaggatgatgacatgcattacaggctcaaaggacagaaactctactcactgaagcacaagatatttgctccccagtgtgtcagaaagatgtgaatggttcagcttcaggtacagcttgatcaagagggcaagtcatttattcaaccaatattttttgagcacctgctgtgtaccagtcacatattgggtgctgggatgatgaaaacatagaccctcagcccagctcctccaagttgaacagggatgagacccatagacacagattccaaaggtggagcccactccacccacatggcccctctccccatccatccaggatcacatggtacgagaagaagccaagagcttgaccccaaagcagtgcgcggttgttgagttggccctggacaccatcaaggtgagaggccctacccctccccatcccaggtgggggatgtagagggtgtggctgctgtggtcatggacttaggctcgcctcggacccacattaatttgttcaatttatggacactccctcgttcccctgtctgtgccagagctgggctggctaatgctggagccttaaggagccccaggtcggggaagactgctggatacagacattctcagccttgtaggattaggcttggggtagagggaaggatgtgggctgggggagcccaaagagtgagaaggtgtagagggaaggatgtaaaggacctcgtgccaggcatttcttgaggtgtagaagggtagagggaaggatgggggctgggcgagcccaaggtgggagaagccaggccttcctggaagacggcatgtgagaggtgggttctgaggaatgcataggagttcactaggcaaagcaaaggaagaggtgagaaagtagtagcgggaagaattgggagtggggacagcagggctacccagccctatgagtgggtagaggttcccaccatcctcacctctccccaccctgtcctccccagcaatatttccacgcgggtggcgtgggcctcaagaagaccttcctggagaagagcccggacctgcaatccttgcgctatgccctgtcgctctacacgcaggccaccgacctgctaatcaagacctttgtacagacgcaatcggcccagggtaagggtacccagaccgcatcaccctttcccgctccgcggagacagccccgccccaagcctgaacggctgccattggctcactcccctgtgacgtcatggatggggcggaattgacatctctgcaccaagtccagggaccaatgagcgatcaaaggttcatgggggcggggcctctgacgtcacaggcctggaggtgatcgtcaacccctgggaaaatctgtgatgtcctggggccagacaatgattaacagctctgggatggaatgtctttgacatcaaggaccagggtaggattgatgactcttaggtgtggaacctgtgacgtcgtagggccacaaggtgattgtcatctcctgggaaaatcaatggtgtcccagggccaatgaatgattgtcagctcctgagggacctggacagtcatgggtccagggaatcgttgacagctctgggagacttcaggagtgattgacagctcaggatgggcaggacctctgatgtcaaggggtcaaggaatgattggcaggtccatgggtgggaactttgacgtcatggtcccagagagtggttgaactcccctgaggagggacctctgtgatgtcatggggctaaggaatgattgacagctccgagggcgggagggacctcgacttggtgggggagggtggacggagagggagttcccatttctcaaactctctctttctctctgtattttgcttcggtctcctgtccctctctgagcgcacacacacggcagctggggctggatggagggcaggattccctggggacccccccttttcaaaattggtcccgacaaggggaagaagtttggcggcttgaactcaggagggggagggagaatcgccatcgacacccagcctggggcgaggggagcaaagccctgtggcctccaacggcccccttctcccccgatccagccagcccaagggccctccgtgggcgctgggtctctgagctcagcttcccttccagtcctggctgcttttagtgtccctggtgtccctggagcaggaggctgtctgtctctccgtctgtctgcagctgacgtttctctctctcttgtttttcctccctctcactcgccgtcccctctccgcgcctcccctgccccctccacacacactcctccatcctcacctctcactggctcgtctctccccgctccccatgcttcccacctctctcccccttccacccccacccccaattagtccatggtggaaaaggtactaggtttacccttagtgaagacatttatcctgagaagggtacgtgcctccgcctcccgcccgccgcccgcgcctggtgcccggtgcctgcgcccctcctggccccggctagtaaaaggatcgtccttctgcctcaagggcctgcagggccgccgcccaggcctgagcggcttggagggcccaggcgggtgagggggaaggacgatttgctggttctacatggggaagaagcgattccagtgggaatcccagaatccatttctcctgatatgacatattttttaagccagatcctgggaccccgggacaggcacctgtcaggttaagagctgggctctgattccagcccagccactccacgggtaggcaccttgggcaagaatctgtctccctgagcctcagttttctcatctgtaaaatggggacagtcaaggaccctacttcataggattattgttattgatattattatttagagacaaggtctccttctgtcacctaggctggaatgcagtggtgcaatcactgctcactgcagcctccctcctgtgctcaagtgatcctcctgccccagcctcccgaggagctgggactacaggcacacgtcacatggctagctaatttttaattttttttgtagagaggtggcctcactttgttgcccaggctgatctcagtgaatacttatcaggctctaaggctgagcaggaccttgtgccaggcatttcttgaagaatctgtgtttggttttgttgttgttgtttgagacagagtctcactctgtcacccaggctggaatgcagtggggaaatctcagctcactgcaacctccgtccgcctcctggtttcaagcgattcttgtgcctcagcctcctgagtagctgggattacaggcccgcaccaccacgcctggctaatttttgtatttttagtagagacggggttttgccatgttggccaggctggtcttgaactcttggcctcaagtggtccacccatcttggcctcggccttccaaagtgctaggatgacaggtgtaatcccagcgcctggccattttgtttttaatttgaggcagacgctgtcacccaggctggagtgcaatggcgaaatctcaggtcactgcagccgccacctcctgggctatgttgcccaggctggtctcgaactcctggcctcaaatgatcctcccaccttggcctcccaaagtgctgggattacaggcatgagcctccatgcctagccttcttggggaaactgaaacagatttctttaactgccccacgaggggtacatcattccacagatgagatactgagagccaaaggagattcaaccacttgtccgaggaaccttcccctgcaggggtcccgggacttggggagtggggagtggggttggaagaagcactgagaggcccaggaaagacccttccccgcgaagccagcaaagcacgggatgggggcacccagcactgcctccctccccccttcttactagctttggccttggtctgacccctcacctgacccaccactgtccaattccccctggcacccccggcaccccagtctggcccggattgagcttgctatgaagcatcggcctgggggagggcggggcggctgagcatgtgactggtggcggggggtgggggtggaatgggagcctgaggcaacaaggaagacggcctggggcgtgcagcaaagaccggggccacataccccagtactggggtgatgggggtctccaggcccctgtgctccccaaccctcagtcacttcctgtccagcgtgaggtaacccaatcagcgtttgactgacccaacctcccaccctcacctctgactttccccttcttctccccgtgcatggggtggtccaggagtggggagttgcctggtggggggtggggaggggttggtggaggtgctggcggtcacaggtccacaggccccacaggatgcccttttgagtcacagaaggcgggaccgggagagattcttttaagctgccccatcagtgatccccattggcaccatggaggacacggctggtggccccaaacagaagcccaccacaccatgattcaagcagacaagggaactttttgactccataatggaaaaattaggggttgaggcctggcgcggtggtgcatgcctgtaatcccagcactttgggaggccaagttgggcggatcacttgaagtcaggagtttgagaccagcctggccaacatggtgaaaccccatctctactaaaaataacaaaaattagccaggcgtgttggtggatgcctgtaatcccagctactcaggaggctgaggcaggagaatcgctttaacctgggaggcggaggttgcagtgagccgagatggtgccattacactccagcctggtgacacagcaagactctatctcaaaaacaaaaaagaaggccaggtgcggtggctcatgcctgtaatcccagcactttgggaggccgaggcgggcagatcaccaggtcaagagatcgagaccatcctggccaacatggtgaaaccccgtctcaaaactacaaaaattagctgggtgtggtggtgtgcacctgtagtcccagctactcaggaggctgaggcaggagaatcgcttgaacctgggaggccgaggttgcagtgagccgagatttcgccattgcactccagcctgggcgacaaagcaagactccatctcaaaaaaaagaaaaaaaaaaaaaaaaaaaaaagaaacttaagattctgcactagaagggaaataggggtaaggaaaataaaagatgccgctatgagctgtcacatcaggagggatgaggattctgggccaggtgatgcaatgaggtgacctgtggggctgggtcagagttaacaagggcaagaatggggtgagtggggagaggtaatagtaacctattggaaagggccactattggaaggggtgttgcaggtcacaaaaaccactttgattatctcagagtgaggtgggagccatggaagagtttggttttgctttgttttgttttttgagacagtcttgctctgtcacccagactgaagtgcagtggcgggatcatagctcactgcagcctcaaccagctgggattaagcgatcctcctgcctcagcctcctagatagctgggactacaggtgcatgcatcaccacacctggctaattttcttttctctctcttttttttttgagacagggtctctctctgtcacccaggctggagtgcagtggtgcaatctcagctcactgcaacctctgcctcccaggttcaagtgattctcctgtctcagcttcccaagtagctgggattacaggcgtgcactaccacacccggctaatttttgtatttttagtagagacagggtttcgccatgttggccaggatgggcttgaactcttgacctcaagttatctgcccacctcagcctcccaaaatgctaggattacaagcatgagcctcccaaagtactggggttacaggcatgagccaccactgcccgacccatggaagagttttgagcagaggagggacatgatctgacttttaaatgttatttatttattttttaattttctgagacagggtcttgctctgtcacccaggttgaagtgcagtggtgcgatctcgtctcactgcagcctggacccttctgagctcaagtgttcctcccacctcagccaccagagtagctggggctacaagcacgccccaccatggccactaatttttgtatttattgtagagatggggttttgccatgttgcccaggctagtctcaaactcctgagctcaagtgagtttgcctcaccctcccaaaatgctgggattacagctgtgagccaccgcgccctgccgacatgatctgacttaataggatttttctggctggtatactgagagtagatgaaagagtggaaggaagaccagcaaggaggctactgcaatagtccaggcatgggatgctgggggcaggtgtaggatacagggaaaagacatggctctgcttctggatgtattttgaaggtagagctggcaggattttccagtttatgggcacctagggaggaagtgaagacaaagaagagtgtcaaatattgaggtgcagggtcagtttgaggacccacggaggagaaaatgacaaaagggggttggagggagtgacaactatgtaggatgagaatcgagttggtgacattgttgcagccaagaggacaaacagccacaggaggccagggtgccagatgctgccaagatgtaatgtaacatgaagactgaattttgacaacatggcaatcaatggaataagaaaaaagaaaagaattgcattaggctcagagaggttaagcaatctacccaagatcacacagcaaggcagtaaaaggccagaacccaggattcttggcttcccaagagcacctcccatcctggccccccatcagtgcctccctatcagggctgatgacctggtgccgccagcacaggtgggtgggaggccgtcaaggtccctcctggtgggtgggaaagaacagagctcacgctgaccatcctcccctgccctgcccaggcttgggtgtagaagaccctgtgggtgaagtctctgtccatgttgagctgttcactcatccaggaactggggaacacaaggtcacagtgaaaggtgagtggtctgaggtgggagggacttgctaggttctaaaacagaaaccaaactcaaactggcttaagcaacaccctttttttgttgttgttgtttaatggtccatgaaacggaaacgtccaaaggtggccaccttcaggcatggctggatccagcagtgtaaacagttttgtaagactgaatcccactttctccatctctcagccctgctttccttttcttggcttttgttgactagaacacagattgggctgtttttgacatggcttaaataagacagaattaggccaggcacggtggctcatgcctgtaatcccagcactttgggaggccaaagctggcggatcaggccaggagttcagaccagcctggccaacatggtgaaaccctgtttctactaaaaattcaaaaagtagctgggtgtggtggcgtgtgcttgtaatcccagctactcaggaggctgaggtgggaggatcgcttgaacccgggaggtggagtttgcagtgagctgagattgcgccactgcactccagcctgggtgacagagtgagactccatgtaaacaaacaaacaaaaatgatagaattggtttttctctgggataacagtttaagtagcaaccagcctcgagctgatatggaggcttcgcagtgttggtgatctgtgctgctgccatcttttgttgcattttcatccctaatgtgttgttgttgttgtttgtttgttttagaggccagagtctcactctgttgcccaggttggagcgctgtggtgcaatcacagcacactgcagcctcaaactcctgggctctagcgatcctcctgcctcagcttccggagtcgctgggattgcaggcatgcagcatcacacctggctactttttaaattatatttttgtagagatggtgtctcactatggtatccaggctggtctcaaactcctggcctcaagcagtcctcccacctgggcctcccaaagtgctgggattccagacgtgagccaccatacctggacccaaatgtgtttttcctccactatagggtcacaaagagctcagcccccacaagcattgcagactgcggctagaggaaggagaaagtttggggttcactccctgccttttaagccacagtggagaagtagtacacgtgatttttttctctcacctcattggccaaaacatagtcatatgaccacacttagcttcatggcaatgctgggaaatgtagtctttatttcagacagggtttttggcggcgggcgaggggtggggtgtttttattttttattttttttagacaggatcttgctttgtcacacaggctggagtgcagtggcacaatctcagctcactgcaactgccgccacccaggctcaagcaatcctcctgctttagccccacaagtatgtgggactacaggcgcgtgccaccacgcccagctgatttttgtatttttcgtagagacagggtttcaccatgttgcccaggctggtctcaaactcctggactcaagtgatccacccgccttggcctcccgaagtggtgggattacaagcgtgagccactgcgcccagccttgggcaggttttgagagccacaaacatctactttttccaactgggagaacctgacctgtcttaccctctacttcctccaacagtggtggctgccaatgacctcaagtggcagacttctggcatcttccggccgttcatcgaggtcaacatcattgggccccagctcagcgacaagaaacgcaagtttgcgaccaaatccaagaacaatagctgggctcccaagtacaatgagagcttccagttgtgagtttgggatgctttgaagagcatgggggcaagggagggggcatccgccaggtgaaccccaaagccagctaggcaggaggtatctggaatctgggcccgggaatgggaggggccacattctaggtgggggtgctggaaagggagaccccttagtagtgcaggaatgacatcagggaggggacacgaggatggaggtcacctttgggggctggcagatccaaggggaggcaatgagtagagtggggtaacttcatgatgaagacttgcagaggggagggaaagtctgggcaggaagtgcatggtgggcagggccattgctggggctggagactctgtctggtgaaggaatgagggtggcagtgatgacgcttatgagcggggggctgagggacctggggacaggactgaggttgcatgggggtggggactactggagtctacattgagccttgtcaggaccgttggggcagcccatctggaggagtcggctctggggacaggagtggagtgtagatggatcccaggcttgggggtgggtgtcacgtggggtggaggtggggtcacattggatggaggttcttggagttgggagtgggcctaggctgcgggtatcaggatagggtctagaggatgctgatgatgtggacagcataaaaaagtctgctctggccgagtgtggtggctcacacctgtcatcccagcactctgggacgccgaggcagacagatcacctgaggtcaggagttcaagaccagcctggccaacatggtgaaaccccgtctctactaaaaatacaaaaaaaaaaaaaaaaattagccgggtgtggtggcgcacgcctgtgatcccagctactcgggatgctgaggcagaagaatcgcttgagtccgggaggcggagggtgcagtgagccaagatcgagccattgcactccagcctgggcaacaaaagcgaaactccacctcaaaaaaaaaaaaaaagtctgctctggccgagcatggtggctcacgcctgtaagctcaacactttgggaggccaaggtgggcagataacttgaggccaggagttcgagaccagcctggccaacatggtgaaactccatctctattaaaaatataaaatatggctgggtgtggtggctcacacctgtaatcccagcactttgggaggccaaggcgggcagatcacgaggtcaggagatcgagaccatcctggctaacacggtgaaaccccgtctctactaaaaatacaaaacctagccaggcgtggtggcgggcgcctgtagtcccagctactcgggaggctgaggcaggagaatggcgtgaacccgggaggcagagcttgcagtgagccgagatcgcaccactgcactccagcctgggcaacagagcaagactccgtctaaaagaaatatatattatataattatatataaaatatgtatttatattatataattatatataaaatatgtatttatattatattatataatatataataaatatatatcatataaatatatttttatatattatatataaatatatatatatttatatacatatataatatatatttatattatatataaaattatatatagtatatattatatagtataaataaaattatatatagtatatattatattatatataaaagtatatatattatatatttcatatattatatattgtatataatatagtatatacaaaaaatattagctgtgtgttgtggtgggcgcctgtaatcccagctacgcgggaggctgagacaggagaatcgcttgaacccaggaggtggaggctgcaatgacccaagatggcgctactgcagtccagcctgggctacagagtgagactcaaaaaaataaaaaatacagaaattagccgggtgtggtggcaggcgcttgtaatcccagctactccagagggtgaggggtacgagaatcgcttgaacccaggaggcacaggttgcagtgagccatgattgtaccacggcactccagcctgggcgacagagcaagactctgcctcaaaaaaaaaaaaaaaaaaaaagtctgttcacgggggtagatggatggtggtggttagcaagggtagagttggggtcatccggggtagatccttgggtcgagtgtcagcctcacagagcactggggcagggcaatgttgttggatgttcttaggagacagaagtgcagaagaaagtagtcccagctacctgggaggctggggcaggaagatcgcttgagctcaggagtttaaggctgcaatgagctatgattgtgccactgcactccagcctgggtgaccgacatagcgagaccctgtctttaaaaaaacaaaaaactatgggccaggcgcggtggctgacgcttgtaattccaacactttgggaggccaaggcagtggatcacctgaggttaggagttcgagaccagcgtggccaacatggtgagacccccccccccgccacccccatctgtactaaaaacacaaaaaatcagcccggtgtggtggtgcatgcctgtaatcccagctactagggaggctgaggcagaagaatcgtttgaacccgggagacagaggttgcagtgagccgcgattgtgccactgcactccagcctgggtgacagagggagatgcccactcaaaaaataaaaataaataaaaataaataaaaatgcacaggggtaagggtaaatcagagctggttagctggtattatctagggggcctgggagctcttatgggacaagattgaagccagttccatgtcgtgtcagcacagggctcttggtcagaaggttttggggcgattggcccctttaggggatactcaggaggagaagcatggtctagtgggaggtcagatgtcagccagggtgggccggagtacttcagggatagaggtacaacctgggaggtggacaagagggagaagctgggcgtgaccctgtaggaggggctcttatccagctggcgtcagggcaggtcactgggactgcttaggggcaggagcacaggtgaggggcatgcgggaggcggtgtcacccatggtgaggcaccagggcaggctcatgtctggagggcatcttggaagtaagaggggtgggctgggggtgtggggggctggggaaagggccacgtcgtgggtctagaggagagcctggttaaagagcttctgggtgggacattaggggcagggccgtgcgggcagcagttcagccggcagagggcacaggcgcgggtatctcagggtgggagcatggccttgcagggcggtgtctgaggggcgggagctggatgtaaaactatgcggtcatttttcggtgggtggaaaaatgggaagaacaggcgtgggcgtggcccagctcggggtcagctgctgtgggcgcggccaagcacagggttgtaggtcaagtaacggggcaggggcggggctagcgtagcgtgggaggtgacaggtgtgggcaccccggtgtgggcgtggcccgcaaatgcggtggggacggggccgtgggcggggcatcacagtaggtgtggcctgtctcacgttccgcccctccccacgcagcacgctgagcgccgacgcgggtcccgagtgctatgagctgcaggtgtgcgtcaaggactactgcttcgcgcgcgaggaccgcacggtggggctggccgtgctgcagctgcgtgagctggcccagcgcgggagcgccgcctgctggctgccgctcggccgccgcatccacatggacgacacgggcctcacggtgctgcgaatcctctcgcagcgcagcaacgacgaggtggccaaggagttcgtgaagctcaagtcggacacgcgctccgccgaggagggcggtgccgcgcctgcgccttagcgcgggcggtcggccgagcggcactgcgcctgcgcggagggcgctgggcggggagggacggggcttgcgccttggtgggacctccccaggggcggggctcggggggctccacgccaagggtgggctgcgcctacgcccttgactcagctttcccttttggggaattaggaatggaggatgccccgccctctcgggaggccacgcccaagggcgcgacgaaggaaggagccacatccccaacttgaggccacgcccccagcacctagggggcattttgagctgggatgggggaaacctcgtccctatggaggaggccacatcccggggctctggtaccgggaggcaccacctcatgtcccctggaaaagccataagatgggacccagacccctgggaccccagaccaattgccaagtatggaaatctcagctccctcgagggggggccctgggcaaggggtagggctctctggagcgcccctctaggtggcctggggactggagggaccaggatgctggttggagggccccggaataccggagtccctttagatatttgtgcaaaaaataaatggggggaggggggaggatgggatttcaaaagcacatgcgcccttgggcgcccaaaccctgggggccgaggggacggctctggttccccacgctgcccctacttccctttgggagtttgcctctccctctcccccaacaaacccagtcctcatatcatagagttcaacacacccatttgacagatggcaaaactgaggcttaaagagctgcttgagacttggccaaggttccaggtgccataccctctgtgcccctcccttaggcctgtgtgccccatggaagggtgggctgagatcgggatgacctgacacagctccctattgctgctaattccccctcggcctcctccaaggggtgggaattccaggccaagacccctacttcgcctttccttctccggctgccaagcaggacctttgccctcagccctttctcctgggatctccatgggggatgccatgagggcctcccaccacaaaagagaatttgggatcccctggtcccaggtttctccatcccttcttccttttccagaattttccaaataggaaagaacagaaggagaccagaaactctaggggggagaaagagaatgagagaaagagaatgagagagagagaaacacaaacacagtgacacagtgagagcttagtctccaagagcctattcattgattcaaacacccaagccacaggatacctcagatggccctcttgccagctggaagctctttctccaatgagcaaagttacagtgacctggctggagttacctggtgcacataggaccttaggggaaagttcagcgtggactacacttgctctgggatctgcttttccacatgtgtgtatggcacgcctttttctgctggattgggaaggacaagattttgctgtgctagggagaaatgaaaacggggtgagctgagtagctgggtttctggaggatagaacatcagatggggaggctttccgaggtgaagaatgagagggaaccacttactagagagaaaagagctccaggcctggggaacagcacgtgcgaaggccaggagagaagaactgttgaaacaacgagaagggtggcacggctggagctgagccagcaagggggatcgtgaggagccttggggttggggagatctgcagaagcatcagaccaggcagggcctcgtacgcagtcctgaggagttttacttttattctaagacagttggggagctccaggagctgttttaagttggggagagactggattccagcctgcaaaagctgttttgtgaagactaaaaccagtgaggagaggtggaggtgctttggggacactgaaatggattcttggaaagattctgaaggctgtgttgaaaagacacctatagctgtggggacatgactataatcccagcatttggggagaccgaggctggcagatcacttaaggtcaggagtttgagaccagcctggccaacatggcgaaaccccatctctgctaaaaatacaaaaattagctgggtgcagtggtgcatgcctgtagtcccagctactcaggagactgaggcgggagaattgtttgaaccctggaggcagaggttgtagtgagtcgtgatcacacaactgcactccagcctgggcaacagaacaatactccattccctcccctctaccccaccaaaaaaaaaaaaaaatcctgcccttagatgagctctagggctgctgagtacagttgtcccagttgcacagtgcccaagggtttggcattgctaagaaggccacgtgcaaatcctagatattgagtgttgtatgtttgtgacgttggtttcccgacatgtgaatggcccaagtgtctggaagaagtggcgccactttctaatttgcttggagatgttgcatgtcccttaaattcagacaggtgcaggtaactggaggttctgaaccaaaggttaaaatgcaaattctcatacagggttgggaagttgtagccagggataagcttatgtgactgttatatggactgaggagcagatgtgaatttcgaaccatgacatggctgagggtaggggtcgggtggatggatgattcagggttgtaacccatagagcccaaaggggaagtgatctgtgacctggggtgagggtgatctggaagatttttggatggctggaaagaaatggggaagtcgagctgcctgagagagccaagttatttcccaaaagattccttaggagtctttctgttcaagacctccgtgtgtgtgtgtgtgtgtttagggttccccagcaatggcccaggcatgtgaaggaaacaagcttcttcagggaatatttgttgaatgagttttcctgactcccaggctagaactgtttttgcaatttccaccctcttttctttcccccagagaactcctattcgtccttcaaaacccatcacggaaacccctcttggagaaaaccctccttccttcccctcaggactttcccagccaccgtctctcctccagtccagcctgatgccatgggactgggggtttctctgtccagctctgtttctcccagactggggtctgaggactctcaggacccccaactttacctagcacaggctgggcacaagtgggtgacagggagtctacgcctagtggaattatgtattggggcagggtcagtgtgagaatacacatccgcatgcatgtctgtccatgtctgtccgtaccaaccttccccttccacacggacctgggcacataggaggtgtctgagcctgacacatgggacagagagtggacatggctgagacacggacagagaaaagacaaggagtccagggggctgaaagccttttgaaatcaggaagttcctgtattggcagaacaaagcccagagaggagcagggctttcctcaacgccacccagcaagtggacacagagcccggccttggatgacacctccagggttctgaaccctggacctcgctttatgcaaggagctggccccacatttccatgaatcggggaaacagcacaagaaggttggcctgtggcagggcaagggttaaaggggtgacattgagggatgcctcagagtcaaagtcccctgaccaagaggaatagagtagaaaacacagagacagagggtgagatcacgccccgatgaggacggagagagacagagatggagagagacatagaggtggaaatatacagagaaagataaatgcagagaccaaggcagggagtgtcgggggaagtaaagagggtgtcctgaagaaagaaggatctgttcactcttaccagtctgtcctcgaatgatttgcataaaatgaggaggtgcctgtccacacccccaattcctctctcaggccccagagcctgagacctcaccatgcccccatcagagatgcaaaaaactaaacacccaactagaaatccttgggacctctctcggctgggatctcagagcctttctgtcccctacccctaccccatgtgctgtcgattttgcagatggggacaacctggggcctcccggaactctgccaccctggggaagttgggggagggccttagtcccggatcacaaccccgtctgctccccagaatcctttcctaagaatcgttgaggaccaaagttgtctttgctgacacgtgttgcttttctctttgccttttattgtttcagagaaaaatcaagttgactgtgtcaagtaacaccccaccccttacccccgtccagccatagtggctctctggagacacaggtcacaggcggagggtcccctgatcatccccaaccacacagccagggggacttgacccctgtccacccctgtctcgtgctccctcagacccccacaaaccggccaagcagtccggggaggcttcccctccacacaactcttagcatgtgattgcagatgtgaaatcaaaacgttgtttgttttttgttttgttttgattctaccccgtcggtccagtgtctgcacagacgccttcatttctctgtaaatatgtgacttggaacaaatgtttaacacaaacgagaagtggtcatgaatgcatggtgttgagatgttttgcactattctgactttttggtctctgtaaaaatattttattaacagcagacattaaaaaaagaaaaaccacacacagccttggacacgtggttgcctcctccttgcattcctttatcagcaaaaaaacaaaaacaaaaacctcacgtacgattagcacctactaggtaggcgcagactcagtagaacacactgcttgcccatgaacgcggctcatccgcaactggagtcatccccattttacagagaaggaaactgaagtacagagagacaagatcttgctcagatcacatagccaggaagagatggagctgggacttgaactcagaacatttgcaaccattgctttttttttttttttttgagatgaagtctctgttgcccaggctggaatgcagtggtgcaatctcagctcactgcaatctccacctcccagattcaagcgattctcctgccttagcctcctgagtagctgggattacaggcgcccgccaccttgcctggctaatttttgtatttttagtagagataggatttcaccatgttggccaggctggtcgcgaacccctgacctcaggtgatccactccctcggcctcccaaagtgctgggattacaggcgtgagccaccgcacccggccatctgttgcccttaaggaagttaagatacaaacactaggaatacatgcccttaattcaacccacacccccatgcttgtttggttttgttgggttttttgggatcttcttgtttgtttgtttttgagacagggtcttgctctgtcacccaggatggagttcagtgtcacaatctcaactcactgcatcctcaacctcccaggctcaggtgatcctcccacctcagcctcctgagtagtgtgcaccaccacacctggctaatttgtgtattttttgtagtgataggatgtcgccatgttgcccagactgctctcgaactcctcactttgggcaatcctctctcctcagccctccaaagtgttgggattacaggcgtgagccactgtgcctggccatgtctgttttaaatgtagcagctggggccaggcgcagtggctcacgcctgtaatcccagcactttaggaggccgaggcgggtggatcacgaggtcaggagatcgagaccatcctggctaacacggtgaaaccccgtctctactaaaagtaccaaaaattagccgggcacggtggcaggcacctgtagttccagctactcgggaggctgaggcaggagaatggtgtgaactggggaggcggagcttgcagtgagccaagatcacgccactgcattccagcctgggtgacggagcgagactccatctcaaaaaaaaaaaaagaaaaaaaagtagcagctgggaatctcatttcataaactcagatgtgtgaggaatgaaactccattttccaacagctgaatttaatttctgttttgagtctccatcccacgaggaagcagaaatggaatctcattcagcccagtttcctcggtaaattccgaaattcccctccttatgtctggggttatttctacatttgagcggacaggacgggagctgcgggatccaccaccaggagtgggttcagtgagtgcttttggttgcaagtaacagacagcaggactaaaagtggggccagaaagtggcttacaccaggagttatccagcacgcagcaatcccgctcctgggggacttttctcctttgagaaacttgcacgtgggggtgtggtatcttctcaaagaatagcatatagctgggaaaaggggacaaaccgcagctgtctgcatgatgtctgcagaggcagcctgcaggtccttgagtgcccctgctcattagctgtttctgtacccaagtgcataggctacgcactgtgactgatgtggatctatttgcccctcgctacaaaagggtctcaagtcttgtccttcagtgtgtgggacccatcgtgttaccaatggggcttggggactgaggctcaagactgcttgctgggaaatgtaacccctttgttctggacaggtagaaggagaggagaatggtcatccaggcctaatgtaaagtttctgcaaccc

(The sequence listing continues in the following parts.)
